(19) United States
(12) Patent Application Publication
(10) Pub. No.: US 2016/0186195 A1
(43) Pub. Date: Jun. 30, 2016

(54) MODIFICATION OF SOYBEAN SEED COMPOSITION TO ENHANCE FEED, FOOD AND OTHER INDUSTRIAL APPLICATIONS OF SOYBEAN PRODUCTS

(71) Applicant: E. I. DU PONT DE NEMOURS AND COMPANY, Wilmington, DE (US)

(72) Inventors: Howard Glenn Damude, Hockessin, DE (US); Knut Meyer, Wilmington, DE (US)

(21) Appl. No.: 14/908,356

(22) PCT Filed: Jul. 30, 2014
(86) PCT No.: PCT/US14/48825

§ 371 Date: Jan. 28, 2016

Related U.S. Application Data
(60) Provisional application No. 61/860,269, filed on Jul. 31, 2013.

(51) Int. Cl. C12N 15/82; A01H 1/02; A01H 5/10

(52) U.S. Cl. CPC C12N 15/8247; A01H 5/10; A01H 1/02; C12N 15/8251; A23L 1/20; A23V 2002/00

(57) ABSTRACT

Polynucleotide sequences encoding diacylglycerol acyltransferases are used in combination with other coding sequence to modify the composition of soybean seed. The modified seed can be used to enhance feed, food and other industrial applications of soybean products.

[0001] This application claims the benefit of U.S. Provisional Application No. 61/860,269, filed Jul. 31, 2013, the entire content of which is herein incorporated by reference.

### REFERENCE TO SEQUENCE LISTING SUBMITTED ELECTRONICALLY

[0002] The official copy of the sequence listing is submitted electronically via EFS-Web as an ASCII formatted sequence listing with a file named 20140729_BB2124USPSP_SequenceLisitng_ST25 created on Jul. 29, 2014 and having a size of 759 kilobytes and is filed concurrently with the specification. The sequence listing contained in this ASCII formatted document is part of the specification and is herein incorporated by reference in its entirety.

### BACKGROUND OF THE INVENTION

[0003] Soybeans are the world's foremost provider of protein and oil representing 30.3 million hectares of crop production in the United Sates in 2011 with a value of over $35.7 billion. Soybeans accounted for 56% of the world oilseed production, with US soybean production accounting for 37% of the world production. Domestically, soybeans provided 66 percent of the edible consumption of fats and oils in the United States. More than 60% of the total value of the US soybean crop was exported as whole soybean, soybean meal or soybean oil.

[0004] Soybean oil is used in food products such as margarine, salad dressings and cooking oils, and industrial products such as plastics, biodiesel fuel and transmission fluids. Lecithin is extracted from soybean oil, is used for pharmaceutical applications and protective coatings. After the removal of soybean oil, the remaining flakes can be processed into various edible soy protein products, or used to produce soybean meal for animal feeds. Soy flour and grits are used in the commercial baking industry. Soy hulls are processed into fiber bran breads, cereal and snacks.

[0005] The continued dominance of soybean use for the aforementioned applications is dependent upon designing soybean seed compositions that will enhance soybean use and value according to the evolving demands in the food and feed industry.

### SUMMARY OF THE INVENTION

[0006] A transgenic soybean seed exhibiting an at least 10% increase in total fatty acids and an at least 1% increase in protein when compared to a control null segregant seed is provided.

[0007] In one embodiment, a transgenic soybean seed comprises a recombinant DNA construct which comprises a polynucleotide operably linked to at least one regulatory sequence and encoding one or more of a DGAT polypeptide, an ODP1 polypeptide, and a Lec1 polypeptide. The transgenic soybean seed comprises one or more of a first construct down regulating GAS activity and a second construct down regulating a fad 3 activity, a fad2 activity, or fat2B activity. The transgenic soybean seed exhibits an at least 10% increase in total fatty acids and an at least 1% increase in protein when compared to a null segregant seed. The first construct and the second construct may be on the same construct or on different constructs as the recombinant DNA construct. The regulatory sequence may be a soybean sucrose synthase promoter or a Medicago truncatula sucrose synthase promoter.

[0008] Fatty acids may be, but are not limited to palmitic, stearic, oleic, linoleic and linolenic acid.

[0009] The ODP1 polypeptide may comprise an amino acid sequence with at least 80%, 85%, 90%, 95%, 96%, 97%, 98%, 99% or 100% identity to SEQ ID NO: 69, SEQ ID NO: 81, or SEQ ID NO:111.

[0010] The Lec1 polypeptide may comprise an amino acid sequence with at least 80%, 85%, 90%, 95%, 96%, 97%, 98%, 99% or 100% identity to SEQ ID NO: 83, 94, 99, or 109.

[0011] The construct downregulating GAS activity may comprise all or part of nucleotide sequences encoding GAS1, GAS2 or GAS3 polypeptides or any combination thereof, wherein the nucleotide sequences encode amino acid sequences with at least 80%, 85%, 90%, 95%, 96%, 97%, 98%, 99% or 100% identity to SEQ ID NO: 139 (GAS3), SEQ ID NO: 140 (GAS1), or SEQ ID NO:143 (GAS2).

[0012] The second construct down regulating a fad 3 activity, a fad2 activity, or a fat2B activity may include one or more nucleotide sequences encoding amino acid sequences having (i) fad 2 activity and with at least 80%, 85%, 90%, 95%, 96%, 97%, 98%, 99% or 100% identity to SEQ ID NO: 119, 121, or 122, (ii) fad 3 activity and with at least 80%, 85%, 90%, 95%, 96%, 97%, 98%, 99% or 100% identity to SEQ ID NO: 129, 131, or 133, and (iii) fatB activity and with at least 80%, 85%, 90%, 95%, 96%, 97%, 98%, 99% or 100% identity to SEQ ID NO: 135 or 137.

[0013] In some embodiments, the percent change of palmitic, linoleic and linolenic acid is a decrease when compared to control null segregant seeds. In yet another embodiment, the percent change of oleic acid in the transgenic seed is an increase when compared to a control null segregant seed not comprising the recombinant constructs disclosed herein. The oleic acid can be increased by at least 25% in transgenic seed (s) compared to a control null segregant seed (s). In some embodiments the percent increase in oleic acid is at least 300% when compared to a control seed. In an additional embodiment the percent change of total saturates is a decrease in the transgenic seed compared to control seeds. Additional embodiments include transgenic seed with percent decreases of palmitic, linoleic, linolenic acid, and total saturates and a percent increase of oleic acid when compared to control null segregant seed seeds.

[0014] Transgenic soybean seeds may also exhibit a percent decrease in raffinose saccharides compared to null segregant seed. The percent decrease in raffinose saccharides can be at least 60% compared to null segregant seed.

[0015] Further embodiments include methods to achieve an increase in total fatty acids and protein content and to alter (increase or decrease) the fatty acid composition of the transgenic seed comprising the constructs described herein compared to null segregant seed. The methods can also include altering the raffinose saccharide, the total saturate, the oleic acid, the palmitic acid, the linoleic acid, and the linolenic acid of the transgenic seeds compared to null segregant seed.

[0016] In one embodiment, a method for increasing total fatty acids and protein in a soybean seed comprises the steps of crossing a first transgenic soybean plant with a second transgenic soybean plant to produce a third soybean plant. The first plant in the cross comprises at least one polynucleotide operably linked to at least one regulatory sequence and encodes a DGAT polypeptide, an ODP1 polypeptide, a Lec1 polypeptide or a combination thereof. The second plant in the cross comprises a construct down regulating a fad2 activity. The third soybean plant is selected from the cross and has seed comprising the polynucleotide and the construct, wherein expression of the polypeptide and the construct in the seed results in a % increase in protein in the seed, when compared to the percent increase in protein of a null segregant seed.

[0017] The downregulating activity of the construct may be one or more of a fad2, fad3, and fatB activity.

[0018] In one embodiment, a method of producing a seed is provided comprising crossing a first transgenic soybean or other species plant with a second transgenic soybean or other species plant. The first plant comprises at least one polynucleotide operably linked to at least one regulatory sequence and encoding a DGAT polypeptide, an ODP1 polypeptide, a Lec1 polypeptide, or a combination thereof. The second plant comprises a construct down regulating a fad2 activity. A third transgenic plant is selected from the crossing and has seed comprising the polynucleotide and the construct and wherein expression of the polynucleotide and the construct results in a percent increase in protein in the seed, when compared to the percent increase of a null segregant seed.

[0019] The polypeptide(s) and construct down-regulating activities may be expressed in at least one tissue of the plant, during at least one condition of abiotic stress, or both. The plant may be maize, soybean, sunflower, sorghum, canola, wheat, alfalfa, cotton, rice, barley, millet, sugar cane or switchgrass.

[0020] The at least one regulatory sequence can be a sucrose synthase promoter, such as a soybean sucrose synthase promoter or Medicago truncatula sucrose synthase promoter.

[0021] The soybean sucrose synthase promoter may comprise a nucleic acid sequence selected from the group consisting of: (a) the nucleic acid sequence of SEQ ID NO: 91; (b) a nucleic acid sequence with at least 95% sequence identity to the nucleic acid sequence of SEQ ID NO: 91; (c) a nucleic acid sequence that hybridizes to SEQ ID NO: 91 under stringent conditions; and (d) a nucleic acid sequence comprising a functional fragment of (a), (b), or (c). The Medicago truncatula sucrose synthase promoter may comprise a nucleic acid sequence selected from the group consisting of: (a) the nucleic acid sequence of SEQ ID NO: 114 or SEQ ID NO: 117; (b) a nucleic acid sequence with at least 95% sequence identity to the nucleic acid sequence of SEQ ID NO: 114 or SEQ ID NO: 117; (c) a nucleic acid sequence that hybridizes to SEQ ID NO: 114 or SEQ ID NO: 117 under stringent conditions; and (d) a nucleic acid sequence comprising a functional fragment of (a), (b) or (c).

[0022] Transgenic soybeans produced by the methods disclosed herein are also included.

[0023] Any of the transgenic seed described herein may comprise a recombinant construct having at least one DGAT sequence which can be selected from the group consisting of DGAT1, DGAT2 and DGAT1 in combination with DGAT2.

[0024] Furthermore, the DGAT sequence can be a Yarrowia sequence or soybean sequence.

[0025] The DGAT1 polypeptide may comprise an amino acid sequence with at least 80%, 85%, 90%, 95%. 96%, 97%, 98%, 99% or 100% sequence identity to SEQ ID NO: 105. The DGAT2 polypeptide may comprise an amino acid sequence with at least 80%, 85%, 90%, 95% identity to SEQ ID NO:107. In another embodiment, a plant or a seed comprising any of the recombinant DNA constructs an suppression constructs described above. The plant and the seed may be an oilseed plant and seed. The plant or seed may be a soybean plant or seed.

[0026] The percent increase in oil of the transgenic soybean seed may be at least 2%, 3%, 4%, 5%, 6%, 7%, 8%, 9%, 10%, 11%, 12%, 13%, 14%, 15%, 16%, 17%, 18%, 19%, 20%, 21%, 22%, 23%, 24%, 25%.

[0027] The percent increase in protein of the transgenic soybean seed may be at least 1%, 2%, 3%, 4%, 5%, 6%, 7%, 8%, compared to a non-transgenic soybean. The percent increase in protein of meal obtained from the transgenic soybean seed may be at least 3%, 4,%, 5%, 6%, 7%, 8%, 9%, 10%, 11% or 12% compared to meal obtained from non-transgenic soybean seed.

[0028] Any of the transgenic seed described herein may comprise a recombinant construct having downregulated GAS activity.

[0029] Also within the scope of the invention are product(s), such as for example meal and/or by-product(s) (e.g. lecithin), and progeny, obtained from the transgenic soybean seeds described herein. Oil and protein products obtained from the transgenic soybean are included, as well as oil and protein products obtained by the methods disclosed herein.

[0030] The oil and protein products (such as, for example, meal) can be used as a blending source to make a blended oil or protein product. Blended oil and protein products can be used in the preparation of feed or food.

### BRIEF DESCRIPTION OF THE DRAWINGS

[0031] FIG. 1 shows a diagram for the process of production of soybean oils and soybean byproducts.

[0032] FIG. 2 shows a schematic of the GmSus promoter region

[0033] FIG. 3 shows an alignment comparing the amino acid sequences of Glyma17g00950 (SEQ ID NO: 56), Glyma07g39820 (SEQ ID NO: 59) and GmLec1 (SEQ ID NO: 64).

### SEQUENCE LISTINGS

[0034] The sequence descriptions summarize the Sequences Listing attached hereto. The Sequence Listing contains one letter codes for nucleotide sequence characters and the single and three letter codes for amino acids as defined in the IUPAC-IUB standards described in Nucleic Acids Research 13:3021-3030 (1985) and in the Biochemical Journal 219(2):345-373 (1984).
[0035] SEQ ID NO: 1 corresponds to the nucleotide sequence of plasmid pKR1756.
[0036] SEQ ID NO: 2 corresponds to the nucleotide sequence of 159-fad3c amiRNA
[0037] SEQ ID NO: 3 corresponds to the nucleotide sequence of the Ann-fad3c-BD30 BsiWI/SbfI fragment.
[0038] SEQ ID NO: 4 corresponds to the nucleotide sequence of plasmid pKR277.
[0039] SEQ ID NO: 5 corresponds to the nucleotide sequence of plasmid pKR1850.
[0040] SEQ ID NO: 6 corresponds to the nucleotide sequence of plasmid KS362.
[0041] SEQ ID NO: 7 corresponds to the nucleotide sequence of the BsiWI fragment containing the beta conglycin/YLDGAT2/phaseolin cassette. SEQ ID NO: 8 corresponds to the nucleotide sequence of plasmid pKR1975. SEQ ID NO: 9 corresponds to the nucleotide sequence of the donor construct QC632.
[0042] SEQ ID NO: 10 corresponds to the nucleotide sequence of the PINII terminator.
[0043] SEQ ID NO: 11 corresponds to the nucleotide sequence of plasmid pKR1763.
[0044] SEQ ID NO: 12 corresponds to the nucleotide sequence of the DNA fragment of the 3′ transcription terminator region of the phaseolin gene with flanking ORFstop sequences (ORFstopA and ORFstopB as well as flanking BsiWi/MluI sites.
[0045] SEQ ID NO: 13 corresponds to the nucleotide sequence of plasmid pKR1849.
[0046] SEQ ID NO: 14 corresponds to the nucleotide sequence of plasmid pKR1857.
[0047] SEQ ID NO: 15 corresponds to the nucleotide sequence of plasmid pKR1980.
[0048] SEQ ID NO: 16 corresponds to the nucleotide sequence of the Not1 fragment containing Gas123 hp.
[0049] SEQ ID NO: 17 corresponds to the nucleotide sequence of plasmid pKR1273.
[0050] SEQ ID NO: 18 corresponds to the nucleotide sequence of plasmid pKR1292.
[0051] SEQ ID NO: 19 corresponds to the nucleotide sequence of plasmid pKR1986 (PHP50573).
[0052] SEQ ID NO: 20 corresponds to the nucleotide sequence of the expression plasmid QC292.
[0053] SEQ ID NO: 21 corresponds to the nucleotide sequence of plasmid QC608 (PHP44664).
[0054] SEQ ID NO: 22 corresponds to the nucleotide sequence of the recombination product of the frt1 and frt87 sites from Target line A with those in plasmid PHP70573.
[0055] SEQ ID NO: 23 corresponds to the nucleotide sequence of plasmid pKR1776.
[0056] SEQ ID NO: 24 corresponds to the nucleotide sequence of plasmid pKR1896.
[0057] SEQ ID NO: 25 corresponds to the nucleotide sequence of plasmid KS362.
[0058] SEQ ID NO: 26 corresponds to the nucleotide sequence of plasmid pKR264.
[0059] SEQ ID NO: 27 corresponds to the nucleotide sequence of plasmid pKR1972.
[0060] SEQ ID NO: 28 corresponds to the nucleotide sequence of plasmid pKR2085.
[0061] SEQ ID NO: 29 corresponds to the nucleotide sequence of plasmid pKR2008.
[0062] SEQ ID NO: 30 corresponds to the nucleotide sequence of plasmid KR2087.
[0063] SEQ ID NO: 31 corresponds to the nucleotide sequence of plasmid pKR2101 (PHP52246).
[0064] SEQ ID NO: 32 corresponds to the nucleotide sequence of plasmid pLF179.
[0065] SEQ ID NO: 33 corresponds to the nucleotide sequence of plasmid pKR1995.
[0066] SEQ ID NO: 34 corresponds to the nucleotide sequence of plasmid pKR2086.
[0067] SEQ ID NO: 35 corresponds to the nucleotide sequence of plasmid pKR2088.
[0068] SEQ ID NO: 36 corresponds to the nucleotide sequence of plasmid pKR2102 (PHP52247).
[0069] SEQ ID NO: 37 corresponds to the nucleotide sequence of recombination product frt1 and frt87 sites from Target line A with those in plasmid PHP52246.
[0070] SEQ ID NO: 38 corresponds to the nucleotide sequence of recombination product frt1 and frt87 sites from Target line A with those in plasmid PHP52247.
[0071] SEQ ID NO: 39 corresponds to the nucleotide sequence of the Arabidopsis Sucrose Synthase 2 gene.
[0072] SEQ ID NO: 40 corresponds to the amino acid sequence of the Arabidopsis Sucrose Synthase 2 gene.
[0073] SEQ ID NO: 41 corresponds to the nucleotide sequence of the predicted genomic soybean homolog of the Arabidopsis Sucrose Synthase 2 gene.
[0074] SEQ ID NO: 42 corresponds to the nucleotide sequence of the cDNA of the soybean homolog to the Arabidopsis Sucrose Synthase 2.
[0075] SEQ ID NO: 43 corresponds to the CDS of the soybean homolog to the Arabidopsis Sucrose Synthase 2.
[0076] SEQ ID NO: 44 corresponds to the amino acid sequence of the soybean homolog to the Arabidopsis Sucrose Synthase 2.
[0077] SEQ ID NO: 45 corresponds to the sequence for the 5′ end of EST sdp3c.pk014.n18.
[0078] SEQ ID NO: 46 corresponds to the sequence of the promoter region of the soybean homolog to the Arabidopsis Sucrose Synthase 2 (GmSus promoter region).
[0079] SEQ ID NO: 47 corresponds to the sequence AW box.
[0080] SEQ ID NO: 48 corresponds to theGmSuSYProm-5 oligonucleotide sequence (forward primer).
[0081] SEQ ID NO: 49 corresponds to the GmSuSYProm-5 oligonucleotide sequence (reverse primer).
[0082] SEQ ID NO: 50 corresponds to the nucleotide sequence of plasmid pLF284.
[0083] SEQ ID NO: 51 corresponds to the nucleotide sequence of plasmid pKR1963.
[0084] SEQ ID NO: 52 corresponds to the nucleotide sequence of plasmid pKR1964.
[0085] SEQ ID NO: 53 corresponds to the nucleotide sequence of plasmid pKR1965.
[0086] SEQ ID NO: 54 corresponds to the nucleotide sequence of cDNA clone se2.11d12.
[0087] SEQ ID NO: 55 corresponds to the coding sequence from clone se2.11d12-Glyma17g00950.
[0088] SEQ ID NO: 56 corresponds to the amino acid sequence of se2.11d12-Glyma17g00950.
[0089] SEQ ID NO: 57 corresponds to the full insert sequence of se1.pk0042.d8.
[0090] SEQ ID NO: 58 corresponds to the coding sequence of clone se1.pk0042.d8.
[0091] SEQ ID NO: 59 corresponds to the amino acid sequence of clone se1.pk0042.d8.
[0092] SEQ ID NO: 60 corresponds to the oligonucleotide sequence SA275.
[0093] SEQ ID NO: 61 corresponds to the oligonucleotide sequence SA276.
[0094] SEQ ID NO: 62 corresponds to the nucleotide sequence of plasmid Glyma17g00950/pCR8/GW/TOPO.
[0095] SEQ ID NO: 63 corresponds to the CDS from the PCR product contained in Glyma17g00950/pCR8/GW/TOPO, named GmLec1.
[0096] SEQ ID NO: 64 corresponds to the amino acid sequence of GmLec1.
[0097] SEQ ID NO: 65 corresponds to the oligonucleotide sequence Gmlec-5.
[0098] SEQ ID NO: 66 corresponds to the oligonucleotide sequence Gmlec-3.
[0099] SEQ ID NO: 67 corresponds to the nucleotide sequence of plasmid pLF275.
[0100] SEQ ID NO: 68 corresponds to the sequence of CDS GmODP1.
[0101] SEQ ID NO: 69 corresponds to the amino acid sequence of GmODP1.
[0102] SEQ ID NO: 70 corresponds to the 396b-GM-MFAD2-1B STAR sequence.
[0103] SEQ ID NO: 71 corresponds to the 159-GM-MFAD2-2 STAR sequence.
[0104] SEQ ID NO: 72 corresponds to the genomic miRNA precursor sequence 159.
[0105] SEQ ID NO: 73 corresponds to the genomic miRNA precursor sequence 396b.
[0106] SEQ ID NO: 74 corresponds to the miRNA precursor sequence 396b-fad2-1b/159-fad2-2.
[0107] SEQ ID NO: 75 corresponds to the sequence of soybean expression vector pKR2109.
[0108] SEQ ID NO: 76 corresponds to the nucleotide sequence of plasmid pKR1968.
[0109] SEQ ID NO: 77 corresponds to the nucleotide sequence of plasmid pKR1971.
[0110] SEQ ID NO: 78 corresponds to the nucleotide sequence of plasmid pKR2118.
[0111] SEQ ID NO: 79 corresponds to the nucleotide sequence of plasmid pKR2120.
[0112] SEQ ID NO: 80 corresponds to the GmODP1 nucleotide sequence.
[0113] SEQ ID NO: 81 corresponds to the GmODP1 amino acid sequence.
[0114] SEQ ID NO: 82 corresponds to the GmLec1 nucleotide sequence.
[0115] SEQ ID NO: 83 corresponds to the GmzLec1 amino acid sequence.
[0116] SEQ ID NO:84 corresponds to the sequence of GM-MFAD2-1B.
[0117] SEQ ID NO:85 corresponds to the sequence of GM-MFAD2-2.
[0118] SEQ ID NO: 86 is the genomic sequence of the soybean Sucrose Synthase gene corresponding to the locus Glyma13g17420.
[0119] SEQ ID NO: 87 is the cDNA sequence of the soybean Sucrose Synthase gene corresponding to the locus Glyma13g17420.
[0120] SEQ ID NO: 88 is the CDS (coding sequence) of the soybean Sucrose Synthase gene corresponding to the locus Glyma13g17420. The soybean homolog to the Arabidopsis sucrose synthase 2 gene set forth in SEQ ID NO: 5 is called GmSuS.
[0121] SEQ ID NO: 89 is the amino acid sequence encoded by SEQ ID NO: 5, and is the sequence of soybean Sucrose Synthase polypeptide.
[0122] SEQ ID NO: 90 is the sequence for the 5′ end of EST sdp3c.pk014.n18.
[0123] SEQ ID NO: 91 is the sequence of the genomic DNA upstream of the start codon of GmSuS (SEQ ID NO: 5), corresponding to the promoter for GmSuS.
[0124] SEQ ID NO: 92 is the sequence of the cDNA clone se2.11d12.
[0125] SEQ ID NO: 93 is the sequence of the soybean clone se2.11d12 from 38-718 bp, and is the coding sequence of Lec1b (GI: 158525282) and corresponds to Glyma17g00950.
[0126] SEQ ID NO: 94 is the amino acid sequence encoded by the nucleotide sequence given in SEQ ID NO: 16.
[0127] SEQ ID NO: 95 is the full insert sequence of the cDNA clone se1.pk0042.d8.
[0128] SEQ ID NO: 96 is the sequence from soybean cDNA clone se1.pk0042.d8 with a corrected start site, corresponding to Glyma07g39820.
[0129] SEQ ID NO: 97 is the amino acid sequence encoded by the sequence given in SEQ ID NO: 96.
[0130] SEQ ID NO: 98 is the nucleotide sequence of GmLec1.
[0131] SEQ ID NO: 99 is the amino acid sequence encoded by the nucleotide sequence given in SEQ ID NO: 98.
[0132] SEQ ID NO: 100 is the CDS of GmODP1.
[0133] SEQ ID NO: 101 is the amino acid sequence of GmODP1.
[0134] SEQ ID NO: 102 is the predicted CDS for Glyma16g05480.
[0135] SEQ ID NO: 103 is the amino acid sequence for Glyma16g05480.
[0136] SEQ ID NO: 104 is the CDS of GmDGAT1cAII.
[0137] SEQ ID NO: 105 is the amino acid sequence of GmDGAT1cAII.
[0138] SEQ ID NO: 106 is the CDS of YLDGAT2.
[0139] SEQ ID NO: 107 is the amino acid sequence of YLDGAT2.
[0140] SEQ ID NO: 108 is the CDS of ZmLec1.
[0141] SEQ ID NO: 109 is the amino acid sequence of ZmLec1.
[0142] SEQ ID NO: 110 is the CDS of ZmODP1.
[0143] SEQ ID NO: 111 is the amino acid sequence of ZmODP1.
[0144] SEQ ID NO: 112 is a conserved Lec1 sequence motif.
[0145] SEQ ID NO: 113 is the nucleotide sequence of the AW box.
[0146] SEQ ID NO: 114 is the nucleotide sequence of the predicted CDS for Medtr4g124660.2.
[0147] SEQ ID NO: 115 is the amino acid sequence encoded by SEQ ID NO: 79.
[0148] SEQ ID NO: 116 is the predicted nucleotide sequence of the Medtr4g124660.2 promoter region.
[0149] SEQ ID NO: 117 is the actual nucleotide sequence of the Medtr4g124660.2 promoter region used.
[0150] SEQ ID NO:118 corresponds to the nucleotide sequence of soy fatty acid biosynthetic gene Glyma10g42470 (GmFad2-1) targeted for silencing.
[0151] SEQ ID NO:119 corresponds to the amino acid sequence encoded by SEQ ID NO:118.
[0152] SEQ ID NO:120 corresponds to the nucleotide sequence of soy fatty acid biosynthetic gene Glyma20g24530 (GmFad2-1) targeted for silencing.
[0153] SEQ ID NO:121 corresponds to the amino acid sequence encoded by SEQ ID NO:120.
[0154] SEQ ID NO:122 corresponds to the nucleotide sequence of soy fatty acid biosynthetic gene Glyma19g32940 (Fad2-2) targeted for silencing.
[0155] SEQ ID NO:123 corresponds to the amino acid sequence encoded by SEQ ID NO:122.
[0156] SEQ ID NO:124 corresponds to the nucleotide sequence of soy fatty acid biosynthetic gene Glyma02g15600 (GmSad) targeted for silencing.
[0157] SEQ ID NO:125 corresponds to the amino acid sequence encoded by SEQ ID NO:124.
[0158] SEQ ID NO:126 corresponds to the nucleotide sequence of soy fatty acid biosynthetic gene Glyma07g32850 (GmSad) targeted for silencing.
[0159] SEQ ID NO:127 corresponds to the amino acid sequence encoded by SEQ ID NO:126.
[0160] SEQ ID NO: 128 corresponds to the nucleotide sequence of soy fatty acid biosynthetic gene Glyma14g37350 (GmFad3) targeted for silencing.
[0161] SEQ ID NO:129 corresponds to the amino acid sequence encoded by SEQ ID NO:128.
[0162] SEQ ID NO:130 corresponds to the nucleotide sequence of soy fatty acid biosynthetic gene Glyma02g39230 (GmFad3) targeted for silencing.
[0163] SEQ ID NO:131 corresponds to the amino acid sequence encoded by SEQ ID NO:130.
[0164] SEQ ID NO:132 corresponds to the nucleotide sequence of soy fatty acid biosynthetic gene Glyma18g06950 (GmFad3) targeted for silencing.
[0165] SEQ ID NO:133 corresponds to the amino acid sequence encoded by SEQ ID NO:132.
[0166] SEQ ID NO:134 corresponds to the nucleotide sequence of soy fatty acid biosynthetic gene Glyma05g08060 (FatB) targeted for silencing.
[0167] SEQ ID NO:135 corresponds to the amino acid sequence encoded by SEQ ID NO:134.
[0168] SEQ ID NO:136 corresponds to the nucleotide sequence of soy fatty acid biosynthetic gene Glyma17g12940 (FatB) targeted for silencing.
[0169] SEQ ID NO:137 corresponds to the amino acid sequence encoded by SEQ ID NO:136.
[0170] SEQ ID NO:138 is the 1151 by sequence derived from clone sdp3c.pk013.c9 (FIS) of the soybean nucleotide sequence containing the ORF [nucleotides 71-1090 (Stop)] of the galactinol synthase 3 gene.
[0171] SEQ ID NO:139 is the 339 amino acid sequence encoded by the ORF [nucleotides 71-1090 (Stop)] of SEQ ID NO: 138.
[0172] SEQ ID NO:140 represents the DNA sequence of the soybean galactinol synthase gene GAS1.
[0173] SEQ ID NO:141 represents the putative translation product DNA sequence of SEQ ID NO:140 the soybean galactinol synthase gene GAS1.
[0174] SEQ ID NO:142 represents the DNA sequence of the soybean galactinol synthase gene GAS2.
[0175] SEQ ID NO:143 represents the putative translation product DNA sequence of SEQ ID NO:142 the soybean galactinol synthase gene GAS2.

### DETAILED DESCRIPTION OF THE INVENTION

[0176] As used herein and in the appended claims, the singular forms “a”, “an”, and “the” include plural reference unless the context clearly dictates otherwise. Thus, for example, reference to “a plant” includes a plurality of such plants, reference to “a cell” includes one or more cells and equivalents thereof known to those skilled in the art, and so forth.

[0177] In the context of this disclosure, a number of terms and abbreviations are used as follows ALS (acetolactate synthase protein), by (base pair), FAD2 (microsomal omega-6 desaturase protein), gm-fad2-1 (soybean microsomal omega-6 desaturase gene 1), gm-als (wild type acetolactate synthase gene from soybean), gm-hra (modified version of acetolactate synthase gene from soybean), kb (kilobase), PCR (polymerase chain reaction) and UTR (untranslated region).

[0178] “microRNA or miRNA” refers to oligoribonucleic acid which regulates expression of a polynucleotide comprising the target sequence. microRNAs (miRNAs) are noncoding RNAs of about 19 to about 24 nucleotides (nt) in length that have been identified in both animals and which regulate expression of a polynucleotide comprising the target sequence. They are processed from longer precursor transcripts that range in size from approximately 70 to 2000 nt or longer, and these precursor transcripts have the ability to form stable hairpin structures.

[0179] “pri-miRNAs” or “primary miRNAs” are long, polyadenylated RNAs transcribed by RNA polymerase II that encode miRNAs. “pre-miRNAs” are primary miRNAs that have been processed to form a shorter sequence that has the capacity to form a stable hairpin and is further processed to release a miRNA. In plants both processing steps are carried out by dicerlike and it is therefore difficult to functionally differentiate between “pri-miRNAs” and “pre-miRNAs”. Therefore, a precursor miRNA, or a primary miRNA, is functionally defined herein as a nucleotide sequence that is capable of producing a miRNA. Given this functional definition, and as will be clear from the Examples and discussion herein, a precursor miRNA, primary miRNA and/or a miRNA can be represented as a ribonucleic acid or, alternatively, in a deoxyribonucleic acid form that “corresponds substantially” to the precursor miRNA, primary miRNA and/or miRNA. It is understood that the DNA in its double-stranded form will comprise a strand capable of being transcribed into the miRNA precursor described. Expression constructs, recombinant DNA constructs, and transgenic organisms incorporating the miRNA encoding DNA that results in the expression of the described miRNA precursors are described.

[0180] A “variable nucleotide subsequence” refers to a portion of a nucleotide sequence that replaces a portion of a pre-miRNA sequence provided that this subsequence is different from the sequence that is being replaced, i.e., it cannot be the same sequence.

[0181] A “target gene” refers to a gene that encodes a target RNA, i.e., a gene from which a target RNA is transcribed. The gene may encode mRNA, tRNA, small RNA, etc.

[0182] A “target sequence” refers to an RNA whose expression is to be modulated, e.g., down-regulated. The target sequence may be a portion of an open reading frame, 5′ or 3′ untranslated region, exon(s), intron(s), flanking region, etc.

[0183] A “star sequence” is the complementary sequence within a miRNA precursor that forms a duplex with the miRNA. The complementarity of the star sequence does not need to be perfect. Non-helix disrupting substitutions (i.e. G:T base pairs etc.) are sometimes found, as well as 1-3 mismatches.

[0184] In the context of this disclosure, a number of terms and abbreviations are used. The following definitions are provided.

[0185] The term “percentage points” (pp) refers to the arithmetic difference of two percentages, e.g. [transgenic value (%)−control value (%)]=percentage points. The term “relative change”, “percent change”, “percent increase”, or “percent decrease” refers to a change expressed as a fraction of the control value, e.g. {[transgenic value(%)−control value (%)]/control value (%)}×100%=percent change.

[0186] The control is a seed, plant, plant part or product comparable to the so transgenic seed, plant, plant part or product which, unless specified to the contrary, lacks the transgenes or is obtained from material lacking the transgenes. In certain embodiments, the control lacks constructs which downregulate specified activities, but which includes the DGAT, OPD1 or Lec1 encoding polynucleotide. In certain embodiments, the control lacks both the constructs downregulating specified activities and the DGAT, OPD1 or Lec1 encoding polynucleotide. In certain embodiments the control includes a fad 2-downregulating construct, but lacks DGAT encoding polynucleotide. In certain embodiments the control is a non-transgenic, null segregant soybean plant, plant part or seed.

[0187] “Non-transgenic, null segregant soybean, control null segregant” refers to a control near isogenic plant, plant part or seed that lacks the transgene (unless otherwise stated), and/or a control parental plant used in the transformation process to obtain the transgenic event. Null segregants can be plants, plant parts or seed that do not contain the transgenic trait due to normal genetic segregation during propagation of the heterozygous transgenic plants.

[0188] The term “or combinations thereof” as used herein refers to all permutations and combinations of the listed items preceding the term. For example, “A, B, C, or combinations thereof’ is intended to include at least one of: A, B, C, AB, AC, BC, or ABC, and if order is important in a particular context, also BA, CA, CB, CBA, BCA, ACB, BAC, or CAB. Continuing with this example, expressly included are combinations that contain repeats of one or more item or term, such as BB, AAA, AB, BBC, AAABCCCC, CBBAAA, CABABB, and so forth. The skilled artisan will understand that typically there is no limit on the number of items or terms in any combination, unless otherwise apparent from the context.

[0189] “Open reading frame” is abbreviated ORF.

[0190] “Polymerase chain reaction” is abbreviated PCR.

[0191] “American Type Culture Collection” is abbreviated ATCC.

[0192] Acyl-CoA:sterol-acyltransferase” is abbreviated ARE2.

[0193] “Phospholipid:diacylglycerol acyltransferase” is abbreviated PDAT.

[0194] “Diacylglycerol acyltransferase” is abbreviated DAG AT or DGAT.

[0195] “Diacylglycerol” is abbreviated DAG.

[0196] “Triacylglycerols” are abbreviated TAGs.

[0197] “Co-enzyme A” is abbreviated CoA.

[0198] “Plastidic Phosphoglucomutase” is abbreviated PGM.

[0199] “Galactinol Synthase” is abbreviated GAS.

[0200] FatB is a thioesterase encoding a palmitoyl-thioesterase (Kinney, A. J. (1997) Genetic engineering of oilseeds for desired traits. In: Genetic Engineering, Vol. 19, (Setlow J. K. Plenum Press, New York, N.Y., pp. 149-166.).

[0201] The term “ODP1” refers to an ovule development protein 1 that is involved with increasing oil content. ODP1 is a member of the APETALA2 (AP2) family of proteins that play a role in a variety of biological events including, but not limited to, oil content.

[0202] U.S. Pat. No. 8,404,926 describes the use of an ODP1 gene for alteration of oil traits in plants. U.S. Pat. No. 7,579,529 describes an AP2 domain transcription factor and methods of its use. U.S. Pat. No. 7,157,621 discloses the use of ODP1 transcription factor for increasing oil content in plants. International patent application WO 2010/114989 describes the use of an Arabidopsis Sus2 promoter to drive ODP1 (WRI1) expression in Arabidopsis. The disclosures of each of these patents and publications are herein incorporated by reference in their entireties.

[0203] Leafy cotyledon1 (Lec1 or Lec1/Hap3) is a transcription factor that is a key regulator of seed development in plants. Lec1 is a CCAAT-binding factor (CBF)—type transcription factor. The terms “leafy cotyledon 1”, “Lec1”, and “Hap3/Lec1” are used interchangeably herein. LEC1 polypeptide is homologous to the HAP3 subunit of the CBF class of eukaryotic transcriptional activators that includes NF-Y, CP1, and HAP2/3/4/5 (Lotan et al. (1998) Cell, Vol. 93, 1195-1205, June 26).

[0204] The leafy cotyledon1 (LEC1) gene controls many distinct aspects of embryogenesis. The lec1 mutation is pleiotropic, which suggest that LEC1 has several roles in late embryo development. For example, LEC1 is required for specific aspects of seed maturation, inhibiting premature germination and plays a role in the specification of embryonic organ identity. Finally, LEC1 appears to act only during embryo development.

[0205] U.S. Pat. No. 6,235,975 describes leafy cotyledon1 genes and their uses. U.S. Pat. No. 7,888,560 relates to isolated nucleic acid fragments encoding Led related transcription factors. U.S. Pat. Nos. 7,294,759, 7,157,621, 7,888,560, and 6,825,397 describe the use of Lec1 genes for altering oil content in plants. The disclosures of each of these patents are herein incorporated by reference in their entireties.

[0206] In Arabidopsis, Lec1 has been shown to regulate the expression of fatty acid biosynthetic genes and Lec1 has also been shown to be involved in embryo development (Mu et al., Plant Physiology (2008) 148: 1042-1054; Lotan et al. (1998) Cell, Vol. 93, 1195-1205, June 26; PCT publication number WO/1998037184 & U.S. Pat. Nos. 6,235,975, 6,320,102, 6,545,201; PCT publication no. WO/2001064022 & U.S. Pat. No. 6,781,035, Braybrook, S. A. and Harada, J. J. (2008) Trends Plant Sci 13(12): 1360-1385). The disclosures of each of these patents and applications are herein incorporated by reference in their entireties.

[0207] WO 99/67405 describes leafy cotyledon1 genes and their uses. A maize Lec1 homologue of the Arabidopsis embryogenesis controlling gene AtLEC1 has been shown to increase oil content and transformation efficiencies in plants. See, for example, WO 03001902 and U.S. Pat. No. 6,512,165. The disclosures of each of these patents and applications are herein incorporated by reference in their entireties.

[0208] Other polypeptides that influence ovule and embryo development and stimulate cell growth, such as, Led, Kn1, WUSCHEL, Zwille and Aintegumeta (ANT) allow for increased transformation efficiencies when expressed in plants. See, for example, U.S. Application No. 2003/0135889, herein incorporated by reference. In fact, a maize Lec1 homologue of the Arabidopsis embryogenesis controlling gene AtLEC1, has been shown to increase oil content and transformation efficiencies in plants. See, for example, WO 03001902 and U.S. Pat. No. 6,512,165. The disclosures of each of these patents and applications are herein incorporated by reference in their entireties.

[0209] The term “fatty acids” refers to long chain aliphatic acids (alkanoic acids) of varying chain length, from about C₁₂ to C₂₂ (although both longer and shorter chain-length acids are known). The predominant chain lengths are between C₁₆ and C₂₂. The structure of a fatty acid is represented by a simple notation system of “X:Y”, so where X is the total number of carbon (C) atoms in the particular fatty acid and Y is the number of double bonds.

[0210] Generally, fatty acids are classified as saturated or unsaturated. The term “saturated fatty acids” refers to those fatty acids that have no “double bonds” between their carbon backbone. In contrast, “unsaturated fatty acids” have “double bonds” along their carbon backbones (which are most commonly in the cis-configuration). “Monounsaturated fatty acids” have only one “double bond” along the carbon backbone (e.g., usually between the 9^{th} and 10^{th} carbon atom as for palmitoleic acid (16:1) and oleic acid (18:1)), while “polyunsaturated fatty acids” (or “PUFAs”) have at least two double bonds along the carbon backbone (e.g., between the 9^{th} and 10^{th}, and 12^{th} and 13^{th} carbon atoms for linoleic acid (18:2); and between the 9^{th} and 10^{th}, 12^{th} and 13^{th}, and 15^{th} and 16^{th} for α-linolenic acid (18:3)).

[0211] “Microbial oils” or “single cell oils” are those oils naturally produced by microorganisms (e.g., algae, oleaginous yeasts and filamentous fungi) during their lifespan. The term “oil” refers to a lipid substance that is liquid at 25° C. and usually polyunsaturated. In contrast, the term “fat” refers to a lipid substance that is solid at 25° C. and usually saturated.

[0212] “Lipid bodies” refer to lipid droplets that usually are bounded by specific proteins and a monolayer of phospholipid. These organelles are sites where most organisms transport/store neutral lipids. Lipid bodies are thought to arise from microdomains of the endoplasmic reticulum that contain TAG-biosynthesis enzymes; and, their synthesis and size appear to be controlled by specific protein components.

[0213] “Neutral lipids” refer to those lipids commonly found in cells in lipid bodies as storage fats and oils and are so called because at cellular pH, the lipids bear no charged groups. Generally, they are completely non-polar with no affinity for water. Neutral lipids generally refer to mono-, di-, and/or triesters of glycerol with fatty acids, also called monoacylglycerol, diacylglycerol or TAG, respectively (or collectively, acylglycerols). A hydrolysis reaction must occur to release free fatty acids from acylglycerols.

[0214] The terms “triacylglycerol”, “oil” and “TAGs” refer to neutral lipids composed of three fatty acyl residues esterified to a glycerol molecule (and such terms will be so used interchangeably throughout the present disclosure herein). Such oils can contain long chain PUFAs, as well as shorter saturated and unsaturated fatty acids and longer chain saturated fatty acids. Thus, “oil biosynthesis” generically refers to the synthesis of TAGs in the cell.

[0215] The term “plant” refers to whole plants, plant organs, plant tissues, seeds, plant cells, seeds and progeny of the same. Plant cells include, without limitation, cells from seeds, suspension cultures, embryos, meristematic regions, callus tissue, leaves, roots, shoots, gametophytes, sporophytes, pollen and microspores.

[0216] “Progeny” comprises any subsequent generation of a plant.

[0217] The terms “monocot” and “monocotyledonous plant” are used interchangeably herein. Monocots include the Gramineae.

[0218] The terms “dicot” and “dicotyledonous plant” are used interchangeably herein. A dicot of the current invention includes the following families: Brassicaceae, Leguminosae, and Solanaceae.

[0219] The terms “full complement” and “full-length complement” are used interchangeably herein, and refer to a complement of a given nucleotide sequence, wherein the complement and the nucleotide sequence consist of the same number of nucleotides and are 100% complementary.

[0220] “Transgenic” refers to any cell, cell line, callus, tissue, plant part or plant, the genome of which has been altered by the presence of a heterologous nucleic acid, such as a recombinant DNA construct, including those initial transgenic events as well as those created by sexual crosses or asexual propagation from the initial transgenic event. The term “transgenic” as used herein does not encompass the alteration of the genome (chromosomal or extra-chromosomal) by conventional plant breeding methods or by naturally occurring events such as random cross-fertilization, non-recombinant viral infection, non-recombinant bacterial transformation, non-recombinant transposition, or spontaneous mutation.

[0221] “Genome” as it applies to plant cells encompasses not only chromosomal DNA found within the nucleus, but organelle DNA found within subcellular components (e.g., mitochondrial, plastid) of the cell.

[0222] “Plant” includes reference to whole plants, plant organs, plant tissues, plant propagules, seeds and plant cells and progeny of same. Plant cells include, without so limitation, cells from seeds, suspension cultures, embryos, meristematic regions, callus tissue, leaves, roots, shoots, gametophytes, sporophytes, pollen, and microspores.

[0223] “Propagule” includes all products of meiosis and mitosis able to propagate a new plant, including but not limited to, seeds, spores and parts of a plant that serve as a means of vegetative reproduction, such as corms, tubers, offsets, or runners. Propagule also includes grafts where one portion of a plant is grafted to another portion of a different plant (even one of a different species) to create a living organism. Propagule also includes all plants and seeds produced by cloning or by bringing together meiotic products, or allowing meiotic products to come together to form an embryo or fertilized egg (naturally or with human intervention).

[0224] “Transgenic plant” includes reference to a plant which comprises within its genome a heterologous polynucleotide. For example, the heterologous polynucleotide is stably integrated within the genome such that the polynucleotide is passed on to successive generations. The heterologous polynucleotide may be integrated into the genome alone or as part of a recombinant DNA construct.

[0225] The commercial development of genetically improved germplasm has also advanced to the stage of introducing multiple traits into crop plants, often referred to as a gene stacking approach. In this approach, multiple genes conferring different characteristics of interest can be introduced into a plant. Gene stacking can be accomplished by many means including but not limited to co-transformation, retransformation, and crossing lines with different transgenes.

[0226] “Transgenic plant” also includes reference to plants which comprise more than one heterologous polynucleotide within their genome. Each heterologous polynucleotide may confer a different trait to the transgenic plant.

[0227] “Heterologous” with respect to sequence means a sequence that originates from a foreign species, or, if from the same species, is substantially modified from its native form in composition and/or genomic locus by deliberate human intervention.

[0228] “Progeny” comprises any subsequent generation of a plant.

[0229] “Polynucleotide”, “nucleic acid sequence”, “nucleotide sequence”, or “nucleic acid fragment” are used interchangeably and is a polymer of RNA or DNA that is single- or double-stranded, optionally containing synthetic, non-natural or altered nucleotide bases. Nucleotides (usually found in their 5′-monophosphate form) are referred to by their single letter designation as follows: “A” for adenylate or deoxyadenylate (for RNA or DNA, respectively), “C” for cytidylate or deoxycytidylate, “G” for guanylate or deoxyguanylate, “U” for uridylate, “T” for deoxythymidylate, “R” for purines (A or G), “Y” for pyrimidines (C or T), “K” for G or T, “H” for A or C or T, “I” for inosine, and “N” for any nucleotide.

[0230] “Polypeptide”, “peptide”, “amino acid sequence” and “protein” are used interchangeably herein to refer to a polymer of amino acid residues. The terms apply to amino acid polymers in which one or more amino acid residue is an artificial chemical analogue of a corresponding naturally occurring amino acid, as well as to naturally occurring amino acid polymers. The terms “polypeptide”, “peptide”, “amino acid sequence”, and “protein” are also inclusive of modifications including, but not limited to, glycosylation, lipid attachment, sulfation, gamma-carboxylation of glutamic acid residues, hydroxylation and ADP-ribosylation.

[0231] “Messenger RNA (mRNA)” refers to the RNA that is without introns and that can be translated into protein by the cell.

[0232] “cDNA” refers to a DNA that is complementary to and synthesized from an mRNA template using the enzyme reverse transcriptase. The cDNA can be single-stranded or converted into the double-stranded form using the Klenow fragment of DNA polymerase I.

[0233] “Coding region” refers to the portion of a messenger RNA (or the corresponding portion of another nucleic acid molecule such as a DNA molecule) which encodes a protein or polypeptide. “Non-coding region” refers to all portions of a messenger RNA or other nucleic acid molecule that are not a coding region, including but not limited to, for example, the promoter region, 5′ untranslated region (“UTR”), 3′ UTR, intron and terminator. The terms “coding region” and “coding sequence” are used interchangeably herein. The terms “non-coding region” and “non-coding sequence” are used interchangeably herein.

[0234] An “Expressed Sequence Tag” (“EST”) is a DNA sequence derived from a cDNA library and therefore is a sequence which has been transcribed. An EST is typically obtained by a single sequencing pass of a cDNA insert.

[0235] “Mature” protein refers to a post-translationally processed polypeptide; i.e., one from which any pre- or pro-peptides present in the primary translation product has been removed.

[0236] “Precursor” protein refers to the primary product of translation of mRNA; i.e., with pre- and pro-peptides still present. Pre- and pro-peptides may be and are not limited to intracellular localization signals.

[0237] “Isolated” refers to materials, such as nucleic acid molecules and/or proteins, which are substantially free or otherwise removed from components that normally accompany or interact with the materials in a naturally occurring environment.

[0238] Isolated polynucleotides may be purified from a host cell in which they naturally occur. Conventional nucleic acid purification methods known to skilled artisans may be used to obtain isolated polynucleotides. The term also embraces recombinant polynucleotides and chemically synthesized polynucleotides.

[0239] The terms “full complement” and “full-length complement” are used interchangeably herein, and refer to a complement of a given nucleotide sequence, wherein the complement and the nucleotide sequence consist of the same number of nucleotides and are 100% complementary.

[0240] “Recombinant” refers to an artificial combination of two otherwise separated segments of sequence, e.g., by chemical synthesis or by the manipulation of isolated segments of nucleic acids by genetic engineering techniques. “Recombinant” also includes reference to a cell or vector, that has been modified by the introduction of a heterologous nucleic acid or a cell derived from a cell so modified, but does not encompass the alteration of the cell or vector by naturally occurring events (e.g., spontaneous mutation, natural transformation/transduction/transposition) such as those occurring without deliberate human intervention.

[0241] The terms “recombinant construct”, “expression construct”, “chimeric construct”, “construct”, and “recombinant DNA construct” are used interchangeably herein. A recombinant construct comprises an artificial combination of nucleic acid fragments, e.g., regulatory and coding sequences that are not found together in nature. For example, a chimeric construct may comprise regulatory sequences and coding sequences that are derived from different sources, or regulatory sequences and coding sequences derived from the same source, but arranged in a manner different than that found in nature. Such a construct may be used by itself or may be used in conjunction with a vector.

[0242] This construct may comprise any combination of deoxyribonucleotides, ribonucleotides, and/or modified nucleotides. The construct may be transcribed to form an RNA, wherein the RNA may be capable of forming a double-stranded RNA and/or hairpin structure. This construct may be expressed in the cell, or isolated or synthetically produced. The construct may further comprise a promoter, or other sequences which facilitate manipulation or expression of the construct.

[0243] The term “conserved domain” or “motif” means a set of amino acids conserved at specific positions along an aligned sequence of evolutionarily related proteins. While amino acids at other positions can vary between homologous proteins, amino acids that are highly conserved at specific positions indicate amino acids that are essential in the structure, the stability, or the activity of a protein.

[0244] Because they are identified by their high degree of conservation in aligned sequences of a family of protein homologues, they can be used as identifiers, or “signatures”, to determine if a protein with a newly determined sequence belongs to a previously identified protein family.

[0245] The terms “homology”, “homologous”, “substantially similar” and “corresponding substantially” are used interchangeably herein. They refer to nucleic acid fragments wherein changes in one or more nucleotide bases do not affect the ability of the nucleic acid fragment to mediate gene expression or produce a certain phenotype. These terms also refer to modifications of the nucleic acid fragments such as deletion or insertion of one or more nucleotides that do not substantially alter the functional properties of the resulting nucleic acid fragment relative to the initial, unmodified fragment. It is therefore understood, as those skilled in the art will appreciate, that the invention encompasses more than the specific exemplary sequences.

[0246] “Regulatory sequences” or “regulatory elements” are used interchangeably and refer to nucleotide sequences located upstream (5′ non-coding sequences), within, or downstream (3′ non-coding sequences) of a coding sequence, and which influence the transcription, RNA processing or stability, or translation of the associated coding sequence. Regulatory sequences may include, but are not limited to, promoters, translation leader sequences, introns, and polyadenylation recognition sequences. The terms “regulatory sequence” and “regulatory element” are used interchangeably herein.

[0247] “Promoter” refers to a nucleic acid fragment capable of controlling transcription of another nucleic acid fragment.

[0248] “Promoter functional in a plant” is a promoter capable of controlling transcription in plant cells whether or not its origin is from a plant cell.

[0249] Promoters that cause a gene to be expressed in most cell types at most times are commonly referred to as “constitutive promoters”.

[0250] High level, constitutive expression of the candidate gene under control of the 35S or UBI promoter may have pleiotropic effects, although candidate gene efficacy may be estimated when driven by a constitutive promoter. Use of tissue-specific and/or stress-specific promoters may eliminate undesirable effects but retain the ability to enhance drought tolerance. This effect has been observed in Arabidopsis (Kasuga et al. (1999) Nature Biotechnol. 17:287-91).

[0251] “Tissue-specific promoter” and “tissue-preferred promoter” are used interchangeably to refer to a promoter that is expressed predominantly but not necessarily exclusively in one tissue or organ, but that may also be expressed in one specific cell. Examples of some seed-specific promoters are the alpha prime subunit of beta conglycinin promoter, soybean sucrose synthase promoter, Medicago trunculatis sucrose synthase promoter, Kunitz trypsin inhibitor 3, annexin promoter, Glyl promoter, beta subunit of beta conglycinin promoter, P34/Gly Bd m 30K promoter, albumin promoter, Leg A1 promoter and Leg A2 promoter.

[0252] “Developmentally regulated promoter” refers to a promoter whose activity is determined by developmental events.

[0253] Inducible promoters selectively express an operably linked DNA sequence in response to the presence of an endogenous or exogenous stimulus, for example by chemical compounds (chemical inducers) or in response to environmental, hormonal, chemical, and/or developmental signals. Examples of inducible or so regulated promoters include, but are not limited to, promoters regulated by light, heat, stress, flooding or drought, pathogens, phytohormones, wounding, or chemicals such as ethanol, jasmonate, salicylic acid, or safeners.

[0254] A minimal or basal promoter is a polynucleotide molecule that is capable of recruiting and binding the basal transcription machinery. One example of basal transcription machinery in eukaryotic cells is the RNA polymerase II complex and its accessory proteins.

[0255] Plant RNA polymerase II promoters, like those of other higher eukaryotes, are comprised of several distinct “cis-acting transcriptional regulatory elements,” or simply “cis-elements,” each of which appears to confer a different aspect of the overall control of gene expression. Examples of such cis-acting elements include, but are not limited to, such as TATA box and CCAAT or AGGA box. The promoter can roughly be divided in two parts: a proximal part, referred to as the core, and a distal part. The proximal part is believed to be responsible for correctly assembling the RNA polymerase II complex at the right position and for directing a basal level of transcription, and is also referred to as “minimal promoter” or “basal promoter”. The distal part of the promoter is believed to contain those elements that regulate the spatio-temporal expression. In addition to the proximal and distal parts, other regulatory regions have also been described, that contain enhancer and/or repressors elements The latter elements can be found from a few kilobase pairs upstream from the transcription start site, in the introns, or even at the 3′ side of the genes they regulate (Rombauts, S. et al. (2003) Plant Physiology 132:1162-1176, Nikolov and Burley, (1997) Proc Natl Acad Sci USA 94: 15-22), Tjian and Maniatis (1994) Cell 77: 5-8; Fessele et al., 2002 Trends Genet 18: 60-63, Messing et al., (1983) Genetic Engineering of Plants: an Agricultural Perspective, Plenum Press, NY, pp 211-227).

[0256] When operably linked to a heterologous polynucleotide sequence, a promoter controls the transcription of the linked polynucleotide sequence.

[0257] “Operably linked” refers to the association of nucleic acid fragments in a single fragment so that the function of one is regulated by the other. For example, a promoter is operably linked with a nucleic acid fragment when it is capable of regulating the transcription of that nucleic acid fragment.

[0258] An intron sequence can be added to the 5′ untranslated region, the protein-coding region or the 3′ untranslated region to increase the amount of the mature message that accumulates in the cytosol. Inclusion of a spliceable intron in the transcription unit in both plant and animal expression constructs has been shown to increase gene expression at both the mRNA and protein levels up to 1000-fold. Buchman and Berg, Mol. Cell Biol. 8:4395-4405 (1988); Callis et al., Genes Dev. 1:1183-1200 (1987).

[0259] “Expression” refers to the production of a functional product. For example, expression of a nucleic acid fragment may refer to transcription of the nucleic acid fragment (e.g., transcription resulting in mRNA or functional RNA) and/or translation of mRNA into a precursor or mature protein.

[0260] “Overexpression” refers to the production of a gene product in transgenic organisms that exceeds levels of production in a control.

[0261] “Phenotype” means the detectable characteristics of a cell or organism.

[0262] “Introduced” in the context of inserting a nucleic acid fragment (e.g., a recombinant DNA construct) into a cell, means “transfection” or “transformation” or “transduction” and includes reference to the incorporation of a nucleic acid fragment into a eukaryotic or prokaryotic cell where the nucleic acid fragment may be incorporated into the genome of the cell (e.g., chromosome, plasmid, plastid or mitochondrial DNA), converted into an autonomous replicon, or transiently expressed (e.g., transfected mRNA).

[0263] A “transformed cell” is any cell into which a nucleic acid fragment (e.g., a recombinant DNA construct) has been introduced.

[0264] “Transformation” as used herein refers to both stable transformation and transient transformation.

[0265] “Stable transformation” refers to the introduction of a nucleic acid fragment into a genome of a host organism resulting in genetically stable inheritance. Once stably transformed, the nucleic acid fragment is stably integrated in the genome of the host organism and any subsequent generation.

[0266] “Transient transformation” refers to the introduction of a nucleic acid fragment into the nucleus, or DNA-containing organelle, of a host organism resulting in gene expression without genetically stable inheritance.

[0267] “Allele” is one of several alternative forms of a gene occupying a given locus on a chromosome. When the alleles present at a given locus on a pair of homologous chromosomes in a diploid plant are the same that plant is homozygous at that locus. If the alleles present at a given locus on a pair of homologous chromosomes in a diploid plant differ that plant is heterozygous at that locus. If a transgene is present on one of a pair of homologous chromosomes in a diploid plant that plant is hemizygous at that locus.

[0268] “Suppression DNA construct” is a recombinant DNA construct which when transformed or stably integrated into the genome of the plant, results in “silencing” of a target gene in the plant. The target gene may be endogenous or transgenic to the plant. “Silencing,” as used herein with respect to the target gene, refers generally to the suppression of levels of mRNA or protein/enzyme expressed by the target gene, and/or the level of the enzyme activity or protein functionality. The terms “suppression”, “suppressing” and “silencing”, used interchangeably herein, include lowering, reducing, declining, decreasing, inhibiting, eliminating or preventing. “Silencing” or “gene silencing” does not specify mechanism and is inclusive, and not limited to, anti-sense, cosuppression, viral-suppression, hairpin suppression, stem-loop suppression, RNAi-based approaches, and small RNA-based approaches.

[0269] A suppression DNA construct may comprise a region derived from a target gene of interest and may comprise all or part of the nucleic acid sequence of the sense strand (or antisense strand) of the target gene of interest. Depending upon the approach to be utilized, the region may be 100% identical or less than 100% identical (e.g., at least 50%, 51%, 52%, 53%, 54%, 55%, 56%, 57%, 58%, 59%, 60%, 61%, 62%, 63%, 64%, 65%, 66%, 67%, 68%, 69%, 70%, 71%, 72%, 73%, 74%, 75%, 76%, 77%, 78%, 79%, 80%, 81%, 82%, 83%, 84%, 85%, 86%, 87%, 88%, 89%, 90%, 91%, 92%, 93%, 94%, 95%, 96%, 97%, 98%, or 99% identical) to all or part of the sense strand (or antisense strand) of the gene of interest.

[0270] Suppression DNA constructs are well-known in the art, are readily constructed once the target gene of interest is selected, and include, without limitation, cosuppression constructs, antisense constructs, viral-suppression constructs, hairpin suppression constructs, stem-loop suppression constructs, double-stranded RNA-producing constructs, and more generally, RNAi (RNA interference) constructs and small RNA constructs such as sRNA (short interfering RNA) constructs and miRNA (microRNA) constructs.

[0271] “Antisense inhibition” refers to the production of antisense RNA transcripts capable of suppressing the expression of the target gene or gene product. “Antisense RNA” refers to an RNA transcript that is complementary to all or part of a target primary transcript or mRNA and that blocks the expression of a target isolated nucleic acid fragment (U.S. Pat. No. 5,107,065, incorporated herein by reference). The complementarity of an antisense RNA may be with any part of the specific gene transcript, i.e., at the 5′ non-coding sequence, 3′ non-coding sequence, introns, or the coding sequence.

[0272] “Cosuppression” refers to the production of sense RNA transcripts capable of suppressing the expression of the target gene or gene product. “Sense” RNA refers to RNA transcript that includes the mRNA and can be translated into protein within a cell or in vitro. Cosuppression constructs in plants have been previously designed by focusing on overexpression of a nucleic acid sequence having homology to a native mRNA, in the sense orientation, which results in the reduction of all RNA having homology to the overexpressed sequence (see Vaucheret et al., Plant J. 16:651-659 (1998); and Gura, Nature 404:804-808 (2000)).

[0273] Another variation describes the use of plant viral sequences to direct the suppression of proximal mRNA encoding sequences (PCT Publication No. WO 98/36083 published on Aug. 20, 1998).

[0274] RNA interference refers to the process of sequence-specific post-transcriptional gene silencing in animals mediated by short interfering RNAs (siRNAs) (Fire et al., Nature 391:806 (1998)). The corresponding process in plants is commonly referred to as post-transcriptional gene silencing (PTGS) or RNA silencing and is also referred to as quelling in fungi. The process of post-transcriptional gene silencing is thought to be an evolutionarily-conserved cellular defense mechanism used to prevent the expression of foreign genes and is commonly shared by diverse flora and phyla (Fire et al., Trends Genet. 15:358 (1999)).

[0275] Small RNAs play an important role in controlling gene expression. Regulation of many developmental processes, including flowering, is controlled by small RNAs. It is now possible to engineer changes in gene expression of plant genes by using transgenic constructs which produce small RNAs in the plant.

[0276] Small RNAs appear to function by base-pairing to complementary RNA or DNA target sequences. When bound to RNA, small RNAs trigger either RNA cleavage or translational inhibition of the target sequence. When bound to DNA target sequences, it is thought that small RNAs can mediate DNA methylation of the target sequence. The consequence of these events, regardless of the specific mechanism, is that gene expression is inhibited.

[0277] Such a recombinant construct promoter would comprise different components such as a promoter which is a DNA sequence that directs cellular machinery of a plant to produce RNA from the contiguous coding sequence downstream (3′) of the promoter. The promoter region influences the rate, developmental stage, and cell type in which the RNA transcript of the gene is made. The RNA transcript is processed to produce mRNA which serves as a template for translation of the RNA sequence into the amino acid sequence of the encoded polypeptide. The 5′ non-translated leader sequence is a region of the mRNA upstream of the protein coding region that may play a role in initiation and translation of the mRNA. The 3′ transcription termination/polyadenylation signal is a non-translated region downstream of the protein coding region that functions in the plant cell to cause termination of the RNA transcript and the addition of polyadenylate nucleotides to the 3′ end of the RNA.

[0278] The origin of the promoter chosen to drive expression of the coding sequences of the polynucleotides disclosed herein is not important as long as it has sufficient transcriptional activity to express translatable mRNA for the desired nucleic acid fragments in the desired host tissue at the right time. Either heterologous or non-heterologous (i.e., endogenous) promoters can be used to in the methods and compositions. For example, suitable promoters include, but are not limited to: the alpha prime subunit of beta conglycinin promoter, the Kunitz trypsin inhibitor 3 promoter, the annexin promoter, the glycinin Gy1 promoter, the beta subunit of beta conglycinin promoter, the P34/Gly Bd m 30K promoter, the albumin promoter, the Leg A1 promoter and the Leg A2 promoter.

[0279] The annexin, or P34, promoter is described in PCT Publication No. WO 2004/071178 (published Aug. 26, 2004). The level of activity of the annexin promoter is comparable to that of many known strong promoters, such as: (1) the CaMV 35S promoter (Atanassova et al., Plant Mol. Biol. 37:275-285 (1998); Battraw and Hall, Plant Mol. Biol. 15:527-538 (1990); Holtorf et al., Plant Mol. 29:637-646 (1995); Jefferson et al., EMBO J. 6:3901-3907 (1987); Wilmink et al., Plant Mol. Biol. 28:949-955 (1995)); (2) the Arabidopsis oleosin promoters (Plant et al., Plant Mol. Biol. 25:193-205 (1994); Li, Texas A & M University Ph.D. dissertation, pp. 107-128 (1997)); (3) the Arabidopsis ubiquitin extension protein promoters (Callis et al., J Biol. Chem. 265(21):12486-93 (1990)); (4) a tomato ubiquitin gene promoter (Rollfinke et al., Gene. 211(2):267-76 (1998)); (5) a soybean heat shock protein promoter (Schoffl et al., Mol Gen Genet. 217(2-3):246-53 (1989)); and, (6) a maize H3 histone gene promoter (Atanassova et al., Plant Mol Biol. 37(2):275-85 (1989)).

[0280] Another useful feature of the annexin promoter is its expression profile in developing seeds. The annexin promoter is most active in developing seeds at early stages (before 10 days after pollination) and is largely quiescent in later stages. The expression profile of the annexin promoter is different from that of many seed-specific promoters, e.g., seed storage protein promoters, which often provide highest activity in later stages of development (Chen et al., Dev. Genet. 10:112-122 (1989); Ellerstrom et al., Plant Mol. Biol. 32:1019-1027 (1996); Keddie et al., Plant Mol. Biol. 24:327-340 (1994); Plant et al., (supra); Li, (supra)). The annexin promoter has a more conventional expression profile but remains distinct from other known seed specific promoters. Thus, the annexin promoter will be a very attractive candidate when overexpression, or suppression, of a gene in embryos is desired at an early developing stage. For example, it may be desirable to overexpress a gene regulating early embryo development or a gene involved in the metabolism prior to seed maturation.

[0281] Following identification of an appropriate promoter suitable for expression of a specific coding sequence of the polynucleotides described herein, the promoter is then operably linked in a sense orientation using conventional means well known to those skilled in the art.

[0282] Standard recombinant DNA and molecular cloning techniques used herein are well known in the art and are described more fully in Sambrook, J. et al., In Molecular Cloning: A Laboratory Manual; 2^{nd} ed.; Cold Spring Harbor Laboratory Press: Cold Spring Harbor, N. Y., 1989 (hereinafter “Sambrook et al., 1989”) or Ausubel, F. M., Brent, R., Kingston, R. E., Moore, D. D., Seidman, J. G., Smith, J. A. and Struhl, K., Eds.; In Current Protocols in Molecular Biology; John Wiley and Sons: New York, 1990 (hereinafter “Ausubel et al., 1990”).

[0283] In one embodiment a transgenic soybean seed comprising a recombinant DNA construct, the recombinant DNA construct comprising at least one polynucleotide encoding a polypeptide selected from the group consisting of (i) a DGAT polypeptide, (ii) an ODP1 polypeptide, (iii) a Lec1 polypeptide, and (iv) a combination thereof, the polynucleotide being linked to at least one regulatory sequence, and wherein the transgenic soybean seed comprises one or more of (i) a first construct down regulating GAS activity, and (ii) a second construct down regulating a fad 3 activity, a fad2 activity, or fat2B activity, wherein the transgenic soybean seed exhibits a percent increase in total fatty acid of at least 10%, and a percent increase in protein of at least 1%, when compared to a control null segregant seed. The first construct and the second construct may be on the same construct or on different constructs as the recombinant DNA construct. The regulatory sequence may be a soybean sucrose synthase promoter or a Medicago truncatula sucrose synthase promoter.

[0284] Fatty acids may be, but are not limited to palmitic, stearic, oleic, linoleic and linolenic acid.

[0285] The ODP1 polypeptide may comprise an amino acid sequence with at least 80%, 85%, 90%, 95% or 100% identity to SEQ ID NO: 69, SEQ ID NO: 81, or SEQ ID NO:111.

[0286] The Lec1 polypeptide may comprises an amino acid sequence with at least 80%, 85%, 90%, 95% or 100% identity to SEQ ID NO: 83, 94, 99, or 109.

[0287] The construct downregulating GAS activity may comprise all or part of nucleotide sequences encoding GAS1, GAS2 or GAS3 polypeptides or any combination thereof, wherein the nucleotide sequences encode amino acid sequences with at least 80%, 85%, 90%, 95% or 100% identity to SEQ ID NO: 139 (GAS3), SEQ ID NO: 140 (GAS1), or SEQ ID NO:143 (GAS2).

[0288] The second construct down regulating a fad 3 activity, a fad2 activity, or fat2B activity. The fad 2 activity may be encoded the nucleotide sequences encoding the amino acid sequences with at least 80%, 85%, 90%, 95% or 100% identity to SEQ ID NO: 119, 121, or 122.

[0289] The fad 3 activity may be encoded by the nucleotide sequences encoding the amino acid sequences with at least 80%, 85%, 90%, 95% or 100% identity to SEQ ID NO: 129, 131, or 133.

[0290] The fatB activity may be encoded by the nucleotide sequences encoding the amino acid sequences with at least 80%, 85%, 90%, 95% or 100% identity to SEQ ID NO: 135, or 137.

[0291] In some embodiments, the percent change of palmitic, linoleic and linolenic acid is a decrease when compared to control null segregant seeds. In yet another embodiment the percent change of oleic acid in the transgenic seed is an increase when compared to a control null segregant. The percent increase in oleic acid can be by at least 25% compared to a control null segregant seed. In some embodiments the percent increase in oleic acid is at least 300% when compared to a control null segregant seed. In an additional embodiment the percent change of total saturates is a decrease in the transgenic seed compared to control null segregant seeds. Additional embodiments include transgenic seed with percent decreases of palmitic, linoleic, linolenic acid, and total saturates and a percent increase of oleic acid when compared to control null segregant seeds.

[0292] Transgenic soybean seeds may also show a percent decrease in raffinose saccharides compared to control null segregant seeds in some embodiments. The percent decrease in raffinose saccharides can be by at least 60% compared to control null segregant seed.

[0293] Further embodiments include methods to achieve a percent increase in total fatty acids in the transgenic, protein content and alter (percent increase or percent decrease) the fatty acid composition of the transgenic seed comprising the polynucleotides and constructs described herein. The methods can also effect percent changes in the raffinose saccharide, the total saturate, the oleic acid, the palmitic acid, the linoleic acid, and the linolenic acid of the transgenic seeds compared to control seeds.

[0294] In one embodiment a method resulting in a percent increase of total fatty acids and a percent increase in protein in a soybean seed, the method comprising the steps of: crossing (i) a first transgenic soybean plant comprising at least one polynucleotide encoding a polypeptide selected from the group consisting of (i) a DGAT polypeptide, (ii) an ODP1 polypeptide, (iii) a Lec1 polypeptide, and (iv) a combination thereof, the polynucleotide being linked to at least one regulatory sequence; with (ii) a second transgenic soybean plant comprising a first construct down regulating a fad2 activity, and (b) selecting a third transgenic plant from the cross of step (a), wherein seed of the third transgenic plant comprises the first recombinant and the first construct and wherein expression of said first polypeptide and said first construct down regulating activity in said transgenic soybean seed results in a percent increase in protein in the transgenic soybean seed, when compared to the percent increase of control null segregant. The first construct down regulating activity may be one or more selected from the group consisting of a fad2, fad3, and fatB activity.

[0295] In one embodiment a method of producing a seed, the method comprising: (a) crossing (i) a first transgenic soybean plant comprising at least one polynucleotide encoding a polypeptide selected from the group consisting of (i) a DGAT polypeptide, (ii) an ODP1 polypeptide, (iii) a Lec1 polypeptide, and (iv) a combination thereof, the polynucleotide being linked to at least one regulatory sequence; with (ii) a second transgenic soybean plant comprising a first construct down regulating a fad2 activity, and (b) selecting a third transgenic plant from the cross of step (a), wherein seed of the third transgenic plant comprises the first recombinant and the first construct and wherein expression of said first polypeptide and said first construct down regulating activity in said transgenic soybean seed results in a percent increase in protein in the transgenic soybean seed, when compared to the percent increase of a control null segregant.

[0296] The polypeptide(s) and construct down-regulating activities may be expressed in at least one tissue of the plant, or during at least one condition of abiotic stress, or both. The plant may be selected from the group consisting of: maize, soybean, sunflower, sorghum, canola, wheat, alfalfa, cotton, rice, barley, millet, sugar cane and switchgrass.

[0297] In yet another embodiment the at least one regulatory sequence is a soybean sucrose synthase promoter or Medicago truncatula sucrose synthase promoter.

[0298] The soybean sucrose synthase promoter may comprise a nucleic acid sequence selected from the group consisting of: (a) the nucleic acid sequence of SEQ ID NO: 91; (b) a nucleic acid sequence with at least 95% sequence identity to the nucleic acid sequence of SEQ ID NO: 91; (c) a nucleic acid sequence that hybridizes to SEQ ID NO: 91 under stringent conditions; and (d) a nucleic acid sequence comprising a functional fragment of (a), (b), or (c).

[0299] Furthermore the polynucleotides disclosed herein may be linked to a Medicago truncatula sucrose synthase promoter, wherein the Medicago truncatula sucrose synthase promoter comprises a nucleic acid sequence selected from the group consisting of: (a) the nucleic acid sequence of SEQ ID NO: 114 or SEQ ID NO: 117; (b) a nucleic acid sequence with at least 95% sequence identity to the nucleic acid sequence of SEQ ID NO: 114 or SEQ ID NO: 117; (c) a nucleic acid sequence that hybridizes to SEQ ID NO: 114 or SEQ ID NO: 117 under stringent conditions; and (d) a nucleic acid sequence comprising a functional fragment of (a), (b) or (c).

[0300] Transgenic soybeans produced by the methods described herein are also included.

[0301] Any of the transgenic seed described herein may comprise a recombinant construct having at least one DGAT sequence which can be selected from the group consisting of DGAT1, DGAT2 and DGAT1 in combination with DGAT2. Furthermore, the DGAT sequence can be a Yarrowia sequence or soybean sequence.

[0302] The DGAT1 polypeptide may comprise an amino acid sequence with at least 80%, 85%, 90%, 95% or 100% sequence identity to SEQ ID NO: 105. The second polynucleotide may encode a DGAT2 polypeptide. The DGAT2 polypeptide may comprise an amino acid sequence with at least 80%, 85%, 90%, 95% sequence identity to SEQ ID NO:107.

[0303] In another embodiment, a plant or a seed comprising any of the recombinant DNA constructs, polynucleotides or suppression constructs described herein is provided. The plant and the seed may be an oilseed plant and seed. The plant or seed may be a soybean plant or seed.

[0304] The percent increase in oil of the transgenic soybean seed may be at least 5%, 6%, 7%, 8%, 9%, 10%, 11%, 12%, 13%, 14%, 15%, 16%, 17%, 18%, 19%, 20%, 21%, 22%, 23%, 24%, 25%.

[0305] The percent increase in protein of the transgenic soybean seed may be at least 1%, 2%, 3%, 4%, 5%, 6%, or 7% compared to a control null segregant soybean seed.

[0306] The percent increase in protein of meal obtained from the transgenic soybean seed may be at least 3%, 4,%, 5%, 6%, 7%, 8%, 9%, 10%, 11% or 12% compared to meal obtained from control null segregant soybean seed.

[0307] Any of the transgenic seed may comprise a recombinant construct having downregulated GAS activity.

[0308] Also within the scope of the invention are product(s), such as for example meal) and/or by-product(s) (e.g. lecithin), and progeny, obtained from the transgenic soybean seeds of the invention. Oil and protein products obtained from the transgenic soybean of the invention are included as well as oil and protein products obtained by the methods of the invention.

[0309] The term “DAG AT” or “DGAT” refers to a diacylglycerol acyltransferase (also known as an acyl-CoA-diacylglycerol acyltransferase or a diacylglycerol O-acyltransferase) (EC 2.3.1.20). This enzyme is responsible for the conversion of acyl-CoA and 1,2-diacylglycerol to TAG and CoA (thereby involved in the terminal step of TAG biosynthesis). Two families of DAG AT enzymes exist: DGAT1 and DGAT2. The former family shares homology with the acyl-CoA:cholesterol acyltransferase (ACAT) gene family, while the latter family is unrelated (Lardizabal et al., J. Biol. Chem. 276(42):38862-28869 (2001)).

[0310] The term “PDAT” refers to a phospholipid:diacylglycerol acyltransferase enzyme (EC 2.3.1.158). This enzyme is responsible for the transfer of an acyl group from the sn-2 position of a phospholipid to the sn-3 position of 1,2-diacylglycerol, thus resulting in lysophospholipid and TAG (thereby involved in the terminal step of TAG biosynthesis). This enzyme differs from DGAT (EC 2.3.1.20) by synthesizing TAG via an acyl-CoA-independent mechanism.

[0311] The term “ARE2” refers to an acyl-CoA:sterol-acyltransferase enzyme (EC 2.3.1.26; also known as a sterol-ester synthase 2 enzyme), catalyzing the following reaction: acyl-CoA+cholesterol=CoA+cholesterol ester.

[0312] The term “Kennedy pathway enzyme genes” are defined as genes encoding enzymes that are involved in providing the immediate precursors for membrane lipid or storage lipid biosynthesis at the endoplasmic reticulum. Kennedy pathway enzymes also include enzymes that catalyze transfer of acyl groups between intermediates of membrane lipid or seed storage lipid biosynthesis at the endoplasmic reticulum (ER). Kennedy pathway enzyme can be soluble, cytosolic enzymes. They can be associated with the ER membrane system or they can be integral membrane proteins of the ER membrane system. A “Kennedy Pathway gene” is further defined as any gene directly involved biosynthesis or degradation of triacylglycerol (TAG) or TAG intermediates. Some examples of genes include glycerol-phosphate dehydrogenase (GPD), glycerol-phosphate acyltransferase (GPAT), glycerol acyltransferase, lyso-phospholipid acyltransferase (LPAT), lyso-phosphatidic acid acyltransferase (LPAAT), lyso-phosphatidylcholine acyltransferase (LPCAT), monoacylglyceride acyltransferase, phosphatidic acid phosphatase (PAP), lyso-phospholipid phospholipase, lyso-phosphatidic acid phospholipase, lyso-phosphatidylcholine phospholipase, phospholipase A1 (PLA1), phospholipase A2 (PLA2), phospholipase B (PLB), phospholipase C (PLC), phospholipase D (PLD), choline phosphotransferase (CPT), plastidic phosphoglucomutase (PGM), phospholipid:diacylglyceride acyltransferase (PDAT), lyso-phospholipid:diglyceride acyltransferase (LPDAT), triacylglyceride lipase, diacylglyceride lipase, monoacylglyceride lipase, and acylCoA binding protein (ACBP).

[0313] The oils can also be used as a blending source to make a blended oil product. By a blending source, it is meant that the oil described herein can be mixed with other vegetable oils to improve the characteristics, such as fatty acid composition, flavor, and oxidative stability, of the other oils. The amount of oil which can be used will depend upon the desired properties sought to be achieved in the resulting final blended oil product. Examples of blended oil products include, but are not limited to, margarines, shortenings, frying oils, salad oils, etc.

[0314] In another aspect, the oils described herein can be subjected to further processing such as hydrogenation, fractionation, interesterification or fat splitting (hydrolysis).

[0315] In still another aspect, by-products made during the production of the oils of are provided.

[0316] Methods for the extraction and processing of soybean seeds to produce soybean oil and meal are well known throughout the soybean processing industry. In general, soybean oil is produced using a series of steps which accomplish the extraction and purification of an edible oil product from the oil bearing seed. Soybean oils and soybean byproducts are produced using the generalized steps shown in FIG. 1.

[0317] Soybean seeds are cleaned, tempered, dehulled, and flaked which increases the efficiency of oil extraction. Oil extraction is usually accomplished by solvent (hexane) extraction but can also be achieved by a combination of physical pressure and/or solvent extraction. The resulting oil is called crude oil. The crude oil may be degummed by hydrating phospholipids and other polar and neutral lipid complexes which facilitate their separation from the nonhydrating, triglyceride fraction (soybean oil). The resulting lecithin gums may be further processed to make commercially important lecithin products used in a variety of food and industrial products as emulsification and release (antisticking) agents. Degummed oil may be further refined for the removal of impurities; primarily free fatty acids, pigments, and residual gums. Refining is accomplished by the addition of caustic which reacts with free fatty acid to form soap and hydrates phosphatides and proteins in the crude oil. Water is used to wash out traces of soap formed during refining. The soapstock byproduct may be used directly in animal feeds or acidulated to recover the free fatty acids. Color is removed through adsorption with a bleaching earth which removes most of the chlorophyll and carotenoid compounds. The refined oil can be hydrogenated resulting in fats with various melting properties and textures. Winterization (fractionation) may be used to remove stearine from the hydrogenated oil through crystallization under carefully controlled cooling conditions. Deodorization which is principally steam distillation so under vacuum is the last step and is designed to remove compounds which impart odor or flavor to the oil. Other valuable byproducts such as tocopherols and sterols may be removed during the deodorization process. Deodorized distillate containing these byproducts may be sold for production of natural vitamin E and other high value pharmaceutical products. Refined, bleached, (hydrogenated, fractionated) and deodorized oils and fats may be packaged and sold directly or further processed into more specialized products. A more detailed reference to soybean seed processing, soybean oil production and byproduct utilization can be found in Erickson, 1995, Practical Handbook of Soybean Processing and Utilization, The American Oil Chemists' Society and United Soybean Board.

[0318] Hydrogenation is a chemical reaction in which hydrogen is added to the unsaturated fatty acid double bonds with the aid of a catalyst such as nickel. High oleic soybean oil contains unsaturated oleic, linoleic, and linolenic fatty acids and each of these can be hydrogenated. Hydrogenation has two primary effects. First, the oxidative stability of the oil is increased as a result of the reduction of the unsaturated fatty acid content. Second, the physical properties of the oil are changed because the fatty acid modifications increase the melting point resulting in a semi-liquid or solid fat at room temperature.

[0319] There are many variables which affect the hydrogenation reaction which in turn alter the composition of the final product. Operating conditions including pressure, temperature, catalyst type and concentration, agitation and reactor design are parameters which can be controlled. Selective hydrogenation conditions can be used to hydrogenate the more unsaturated fatty acids in preference to the less unsaturated ones. Very light or brush hydrogenation is often employed to increase stability of liquid oils. Further hydrogenation converts a liquid oil to a physically solid fat. The degree of hydrogenation depends on the desired performance and melting characteristics designed for the particular end product. Liquid shortenings, used in the manufacture of baking products, solid fats and shortenings used for commercial frying and roasting operations, and base stocks for margarine manufacture are among the myriad of possible oil and fat products achieved through hydrogenation. A more detailed description of hydrogenation and hydrogenated products can be found in Patterson, H. B. W., 1994, Hydrogenation of Fats and Oils: Theory and Practice, The American Oil Chemists' Society.

[0320] Interesterification refers to the exchange of the fatty acyl moiety between an ester and an acid (acidolysis), an ester and an alcohol (alcoholysis) or an ester and ester (transesterification). Interesterification reactions are achieved using chemical or enzymatic processes. Random or directed transesterification processes rearrange the fatty acids on the triglyceride molecule without changing the fatty acid composition. The modified triglyceride structure may result in a fat with altered physical properties. Directed interesterfication reactions using lipases are becoming of increasing interest for high value specialty products like cocoa butter substitutes. Products being commercially produced using interesterification reactions include but are not limited to shortenings, margarines, cocoa butter substitutes and structured lipids containing medium chain fatty acids and polyunsaturated fatty acids. Interesterification is further discussed in Hui, Y. H., 1996, Bailey's Industrial Oil and Fat Products, Volume 4, John Wiley & Sons.

[0321] Fatty acids and fatty acid methyl esters are two examples of oleochemicals derived from vegetables oils. Fatty acids are used for the production of many products such as soaps, medium chain triglycerides, polyol esters, alkanolamides, etc. Vegetable oils can be hydrolyzed or split into their corresponding fatty acids and glycerine. Fatty acids produced from various fat splitting processes may be used crude or more often are purified into fractions or individual fatty acids by distillation and fractionation. Purified fatty acids and fractions thereof are converted into a wide variety of oleochemicals, such as dimer and trimer acids, diacids, alcohols, amines, amides, and esters. Fatty acid methyl esters are increasingly replacing fatty acids as starting materials for many oleochemicals such as fatty alcohols, alkanolamides, a-sulfonated methyl esters, diesel oil components, etc. Glycerine is also obtained by the cleavage of triglycerides using splitting or hydrolysis of vegetable oils. Further references on the commercial use of fatty acids and oleochemicals may be found in Erickson, D. R., 1995, Practical Handbook of Soybean Processing and Utilization, The American Oil Chemists' Society, and United Soybean Board; Pryde, E. H., 1979, Fatty Acids, The American Oil Chemists' Society; and Hui, Y. H., 1996, Bailey's Industrial Oil and Fat Products, Volume 4, John Wiley & Sons.

[0322] Soy protein products fall into three major groups. These groups are based on protein content, and range from 40% to over 90%. All three basic soy protein product groups (except full-fat flours) are derived from defatted flakes. They are the following: soy flours and grits, soy protein concentrates and soy protein isolates. These are discussed more fully below.

[0323] Additional embodiments include soy protein products with at least 40%, 41%, 42%, 43%, 44%, 45%, 46%, 47%, 48%, 49%, 50%, 51%, 52%, 53%, 54%, 55%, 56%, 57%, 58%, 59%, 60%, 61%, 62%, 63%, 64%, 65%, 66%, 67%, 68%, 69%, 70%, 71%, 72%, 73%, 74%, 75%, 76%, 77%, 78%, 79%, 80%, 81%, 82%, 83%, 84%, 85%, 86%, 87%, 88%, 89%, 90%, 91%, 92%, 93%, 94%, 95%, 96% or 97% protein (N×6.25) on a moisture-free basis.

[0324] The soy protein products described herein can be incorporated into food, beverages, and animal feed.

[0325] The term “animal feed” refers to food that is given to animals, such as livestock and pets. Some feeds provide a healthy and nutritious diet, while others may be lacking in nutrients. Animals are given a wide range of different feeds, but the two major types of animal feed are processed animal feeds (compound feed) and fodder.

[0326] Compound feeds are feedstuffs that are blended from various raw materials and additives. The main ingredients used in commercially prepared feed are the feed grains, which include corn, soybeans, sorghum, oats, and barley. These blends are formulated according to the specific requirements of the target animal (including different types of livestock and pets).

[0327] They are manufactured by feed compounders as meal type, pellets or crumbles.

[0328] Compound feeds can be complete feeds that provide all the daily required nutrients, concentrates that provide a part of the ration (protein, energy) or supplements that only provide additional micro-nutrients such as minerals and vitamins.

[0329] Oxidation and therefore the shelf life of animal feed ingredients is a common problem in the industry. Oxidation is an irreversible chemical reaction in which oxygen reacts with feed and feed components and can result in decreased animal health and performance. The negative effects of oxidation can be seen in loss of palatability, degradation of the oil component, development of unwanted breakdown products, changes in color, and loss of energy. Meat obtained from animals grown on oxidized feed has significantly lower oxidative status compared to animals fed a feed that has not undergone significant oxidation. Meat from animals fed diets containing high oleic corn products show extended shelf life and greater oxidative stability (PCT Publication WO/2006/002052, published Jan. 5, 2006), particularly when combined with antioxidants such as tocols. Therefore it is highly desirable to prevent oxidation of feed and feed ingredients to protect both nutritional value and organoleptic quality.

[0330] Synthetic antioxidants are used to preserve feed quality by preventing the oxidation of lipids, which can lead to improved animal performance. Generally, synthetic antioxidants can act as free radical scavengers and thereby reduce lipid oxidation. Synthetic antioxidants can prolong animal feed shelf-life and protect nutritional and organoleptic quality

[0331] There are multiple methods to test the oxidation status of solid materials including soybean meal and other soybean protein products including accelerating aging methods which predict a material's shelf-life. One test which can be used is to age a material either at room temperature or elevated temperatures and to measure the oxidative status of the material at specific time points. The OSI instrument is useful in this regard in that it reflects the length of time needed to start the oxidation process known as the induction time. A longer induction time means that the material has greater oxidative stability and thereby shelf-life. Other methods include the measurement of volatiles and color change.

[0332] Methods for obtaining soy protein products are well known to those skilled in the art. For example soybean protein products can be obtained in a variety of ways. Conditions typically used to prepare soy protein isolates have been described by (Cho, et al, (1981) U.S. Pat. No. 4,278,597; Goodnight, et al. (1978) U.S. Pat. No. 4,072,670). Soy protein concentrates are produced by three basic processes: acid leaching (at about pH 4.5), extraction with alcohol (about 55-80%), and denaturing the protein with moist heat prior to extraction with water. Conditions typically used to prepare soy protein concentrates have been described by Pass ((1975) U.S. Pat. No. 897,574) and Campbell et al. ((1985) in New Protein Foods, ed. by Altschul and Wilcke, Academic Press, Vol., Chapter 10, Seed Storage Proteins, pp 302-338). The disclosures of each of these patents are herein incorporated by reference in their entireties.

[0333] “Soybean-containing products” or “Soy products” can be defined as those products containing/incorporating a soy protein product.

[0334] For example, “soy protein products” can include, and are not limited to, those items listed in Table 1.

TABLE 1
Soy protein products derived from soybean seeds^{a}

| Whole Soybean Products | Processed Soy Protein Products |
|---|---|
| Roasted Soybeans | Full Fat and Defatted Flours |
| Baked Soybeans | Soy Grits |
| Soy Sprouts | Soy Hypocotyls |
| Soy Milk | Soybean Meal |
| | Soy Milk |
| | Soy Milk Powder |
| | Soy Protein Isolates |
| Specialty Soy Foods/Ingredients | |
| Soy Milk | Soy Protein Concentrates |
| Tofu | Textured Soy Proteins |
| Tempeh | Textured Flours and Concentrates |
| Miso | Textured Concentrates |
| Soy Sauce | Textured Isolates |
| Hydrolyzed Vegetable Protein | Soy Crisps |
| Whipping Protein | |

^{a}See Soy Protein Products: Characteristics, Nutritional Aspects and Utilization (1987). Soy Protein Council.

[0335] “Processing” refers to any physical and chemical methods used to obtain the products listed in Table 1 and includes, and is not limited to, heat conditioning, flaking and grinding, extrusion, solvent extraction, or aqueous soaking and extraction of whole or partial seeds. Furthermore, “processing” includes the methods used to concentrate and isolate soy protein from whole or partial seeds, as well as the various traditional Oriental methods in preparing fermented soy food products. Trading Standards and Specifications have been established for many of these products (see National Oilseed Processors Association Yearbook and Trading Rules 1991-1992).

[0336] Defatted flakes refer to flaked, dehulled cotyledons that have been defatted and treated with controlled heat to remove the remaining hexane. This term can also refer to a flour or grit that has been ground.

[0337] “White” flakes refer to flaked, dehulled cotyledons that have been defatted and treated with controlled heat to remove the remaining hexane. This term can also refer to a flour that has been ground.

[0338] “Grits” refer to defatted, dehulled cotyledons having a U.S. Standard screen size of between No. 10 and 80.

[0339] “Soy Protein Concentrates” refer to those products produced from dehulled, defatted soybeans and typically contain 65 wt % to 90 wt % soy protein on a moisture free basis. Soy protein concentrates are typically manufactured by three basic processes: acid leaching (at about pH 4.5), extraction with alcohol (about 55-80%), and denaturing the protein with moist heat prior to extraction with water. Conditions typically used to prepare soy protein concentrates have been described by Pass (1975) U.S. Pat. No. 3,897,574 (herein incorporated by reference in its entirety); Campbell et al., (1985) in New Protein Foods, ed. by Altschul and Wilcke, Academic Press, Vol. 5, Chapter 10, Seed Storage Proteins, pp 302-338).

[0340] As used herein, the term “soy protein isolate” or “isolated soy protein” refers to a soy protein containing material that contains at least 90% soy protein by weight on a moisture free basis.

[0341] “Extrusion” refers to processes whereby material (grits, flour or concentrate) is passed through a jacketed auger using high pressures and temperatures as a means of altering the texture of the material. “Texturing” and “structuring” refer to so extrusion processes used to modify the physical characteristics of the material. The characteristics of these processes, including thermoplastic extrusion, have been described previously (Atkinson (1970) U.S. Pat. No. 3,488,770 (herein incorporated by reference in its entirety), Horan (1985) In New Protein Foods, ed. by Altschul and Wilcke, Academic Press, Vol. 1A, Chapter 8, pp 367-414). Moreover, conditions used during extrusion processing of complex foodstuff mixtures that include soy protein products have been described previously (Rokey (1983) Feed Manufacturing Technology III, 222-237; McCulloch, U.S. Pat. No. 4,454,804; herein incorporated by reference in its entirety).

[0342] The oils disclosed herein can be used in a variety of applications, including in the preparation of foods. Examples include, but are not limited to, uses as ingredients, as coatings, as salad oils, as spraying oils, as roasting oils, and as frying oils. Foods in which the oil may be used include, but are not limited to, crackers and snack foods, confectionery products, syrups and toppings, sauces and gravies, soups, batter and breading mixes, baking mixes and doughs. Foods which incorporate the oil may retain better flavor over longer periods of time due to the improved stability against oxidation imparted by this oil.

[0343] In another aspect, soybean oil described herein can be used in industrial applications. Soybean oils described herein can be low in polyunsaturates and have high oxidative stability and high temperature stability. These oils are desirable for industrial applications such as an industrial fluid, for example as an industrial lubricant or as a hydraulic fluid, etc. Additives which can be used to make industrial lubricants and hydraulic fluids are commercially available, including additives specially formulated for use with high oleic vegetable oils. Additives generally contain antioxidants and materials which retard foaming, wear, rust, etc.

[0344] One common method for measuring oxidative stability of industrial fluids is the rotary bomb oxidation test (ASTM D-2272). The performance of the oil of this invention when compared to commercially available products using the rotary bomb oxidation test is set forth in the example below.

[0345] Residual fatty acid analysis. The commercial process used to de-fat soy flakes with hexane leaves a residue of fatty acids that can act as substrate for generation of off-flavor compounds. Depending on the method of analysis, the residual fat content of hexane-defatted soy flakes can range from, 0.6-1.0% (W:W) (ether extractable; AOCS Method 920.39 (Official Methods of Analysis of the AOAC International (1995), 16^{th} Edition, Method 920.39C, Locator #4.2.01 (modified)) to 2.5-3% (W:W) (acid hydrolysable; AOAC Method 922.06 (Official Methods of Analysis of the AOAC International (1995), 16^{th} Edition, Method 922.06, Locator 32.1.13 (modified)). The principle reason for the discrepancy between these two methods of estimating residual fatty acids is the chemical nature of the fat classes associated with the protein matrix after hexane extraction. A small proportion of the residual fatty acid is in the form of neutral lipid (i.e., triglyceride) and the remainder is present as polar lipid (e.g., phospholipids, a.k.a., lecithin). Because of its polar nature the phospholipid is inaccessible to ether extraction and is only removed from the protein matrix if acid hydrolysis or some other stringent extraction protocol is performed. Therefore, the ether extraction technique gives an estimation of the neutral lipid fraction whereas the acid hydrolysable method gives a better estimate of the total residual fatty acid content (i.e., neutral and polar fractions).

[0346] Both of the AOAC methods described above rely on gravimetric determinations of the residual fatty acids and, although in combination they give an indication of the fat classes (neutral vs. polar), such estimates are crude and are subject to interference from other hydrophobic materials (e.g. saponins). Further, no information is obtained on the fatty acid composition and how it may have been affected by various experimental treatments or by the genetics of the starting material. AOAC methods for the determination of the fatty acid composition of residual fatty acids are available (Official Methods of Analysis of the AOAC International (2000), 17^{th} Edition, Method 983.23 Locator 45.4.02, Method 969.33 Locator 41.1.28, Method 996.06 Locator 41.1.28A). These are based on the conversion of residual fatty acids, extracted by acid hydrolysis, to fatty acid methyl esters prior to analysis by gas chromatography. Such techniques are rarely used to assess the residual fatty acid content of food materials in commercial settings although they are used for fatty acid evaluations in support of nutritional labeling. A report in which these methods have been used to determine the residual fatty acid composition of commercial soy protein isolates has recently been published (Solina et al. (2005) Volatile aroma components of soy protein isolate and acid-hydrolysed vegetable protein Food Chemistry 90: 861-873)

[0347] Also disclosed are food, food supplements, food bars, and beverages as well as animal feed (such as pet foods) that have incorporated therein a soybean protein product described herein. The beverage can be in a liquid or in a dry powdered form.

[0348] The foods to which the soybean protein product described herein can be incorporated or added include almost all foods, beverages and feed (such as pet foods). For example, there can be mentioned food supplements, food bars, meats such as meat alternatives, ground meats, emulsified meats, marinated meats, and meats injected with a soybean protein product. Included may be beverages such as nutritional beverages, sports beverages, protein-fortified beverages, juices, milk, milk alternatives, and weight loss beverages. Mentioned may also be cheeses such as hard and soft cheeses, cream cheese, and cottage cheese. Included may also be frozen desserts such as ice cream, ice milk, low fat frozen desserts, and non-dairy frozen desserts. Finally, yogurts, soups, puddings, bakery products, salad dressings, spreads, and dips (such as mayonnaise and chip dips) may be included.

[0349] A soy protein product can be added in an amount selected to deliver a desired amount to a food and/or beverage. The terms “soybean protein product” and “soy protein product” are used interchangeably herein.

[0350] Any of the transgenic soybean seeds described herein can be used as a source of a protein product.

[0351] The oils and protein products (such as for example meal) described herein can also be used as a blending source to make a blended oil or protein product. By a blending source, it is meant that the oil can be mixed with other vegetable oils to improve the characteristics, such as fatty acid composition, flavor, and oxidative stability, of the other oils. Examples of blended oil products include, but are not limited to, margarines, shortenings, frying oils, salad oils, etc.

[0352] The blending source for a protein product can be another protein product to improve the characteristics of the blended product, such as lower raffinose saccharides, increase sucrose, protein etc. or increased stability due to presence of residual fatty acids, such as increased amounts of oleic acid.

[0353] Soybeans with decreased levels of saturated fatty acids have been described resulting from mutation breeding (Erickson et al. (1994) J. Hered. 79:465-468; Schnebly et al. (1994) Crop Sci. 34:829-833; and Fehr et al. (1991) Crop Sci. 31:88-89) and transgenic modification (U.S. Pat. No. 5,530,186 herein incorporated by reference in its entirety).

[0354] Two soybean fatty acid desaturases, designated FAD2-1 and FAD2-2, are Δ-12 desaturases that introduce a second double bond into oleic acid to form linoleic acid, a polyunsaturated fatty acid. FAD2-1 is expressed only in the developing seed (Heppard et al. (1996) Plant Physiol. 110:311-319). The expression of this gene increases during the period of oil deposition, starting around 19 days after flowering, and its gene product is responsible for the synthesis of the polyunsaturated fatty acids found in soybean oil. GmFad 2-1 is described in detail by Okuley, J. et al. (1994) Plant Cell 6:147-158 and in WO94/11516. It is available from the ATCC in the form of plasmid pSF2-169K (ATCC accession number 69092). FAD 2-2 is expressed in the seed, leaf, root and stem of the soy plant at a constant level and is the “housekeeping” 12-desaturase gene. The Fad 2-2 gene product is responsible for the synthesis of polyunsaturated fatty acids for cell membranes.

[0355] Since FAD2-1 is the major enzyme of this type in soybean seeds, reduction in the expression of FAD2-1 results in increased accumulation of oleic acid (18:1) and a corresponding decrease in polyunsaturated fatty acid content.

[0356] Reduction of expression of FAD2-2 in combination with FAD2-1 leads to a greater accumulation of oleic acid and corresponding decrease in polyunsaturated fatty acid content.

[0357] FAD3 is a Δ-15 desaturase that introduces a third double bond into linoleic acid (18:2) to form linolenic acid (18:3). Reduction of expression of FAD3 in combination with reduction of FAD2-1 and FAD2-2 leads to a greater accumulation of oleic acid and corresponding decrease in polyunsaturated fatty acid content, especially linolenic acid.

[0358] Nucleic acid fragments encoding FAD2-1, FAD2-2, and FAD3 have been described in WO 94/11516 and WO 93/11245. Chimeric recombinant constructs comprising all or a part of these nucleic acid fragments or the reverse complements thereof operably linked to at least one suitable regulatory sequence can be constructed wherein expression of the chimeric gene results in an altered fatty acid phenotype. A chimeric recombinant construct can be introduced into soybean plants via transformation techniques well known to those skilled in the art.

[0359] Transgenic soybean plants resulting from a transformation with a recombinant DNA are assayed to select plants with altered fatty acid profiles. The recombinant construct may contain all or part of 1) the FAD2-1 gene or 2) the FAD2-2 gene or 3) the FAD3 gene or 4) combinations of all or portions of the FAD2-1, Fad2-2, or FAD3 genes.

[0360] Recombinant constructs comprising all or part of 1) the FAD2-1 gene with or without 2) all or part of the Fad2-2 gene with or without all or part of the FAD3 gene can be used in making a transgenic soybean plant having a high oleic phenotype. An altered fatty acid profile, specifically an increase in the proportion of oleic acid and a decrease in the proportion of the polyunsaturated fatty acids, indicates that one or more of the soybean seed FAD genes (FAD2-1, Fad2-2, FAD3) have been suppressed. Assays may be conducted on soybean somatic embryo cultures and seeds to determine suppression of FAD2-1, Fad2-2, or FAD3.

[0361] A transgenic soybean seed is provided having an increased total fatty acid content of at least 10%, an increased protein content of at least 1% and an altered (increased or decreased) fatty acid content of at least one fatty acid when compared to a control null segregant. The recombinant DNA construct(s) comprise at least one poly-nucleotide encoding a polypeptide selected from the group consisting of: a DGAT polypeptide, an ODP1 polypeptide, and a Lec1 polypeptide, alone or in combination with a construct downregulating GAS activity, alone or in combination with at least one construct downregulating activity selected from the group consisting of: a fad 3 activity, a fad2 activity and fat2B activity. The recombinant constructs can be in the same or in separate recombinant construct(s), linked to at least one regulatory sequence. Fatty acids may be oleic, stearic, palmitic, linoleic and linolenic acid.

[0362] In some embodiments, the level of palmitic, linoleic and linolenic acid is decreased when compared to control null segregant. In yet another embodiment, the level of oleic acid in the transgenic seed is increased when compared to a control null segregant. The increase in oleic acid can be increased by at least 25% compared to a control null segregant seed. In yet another embodiment the oleic acid content can be increased by at least 300% compared to a control seed. In an additional embodiment the level of total saturates is decreased In the transgenic seed. Additional embodiments include transgenic seed with decreased levels of palmitic, linoleic and linolenic acid, decreased total saturates and increased oleic acid levels when compared control null segregant. The level of raffinose saccharides may also decreased compared to control null segregant seeds in some embodiments. The decrease in raffinose saccharides can be by at least 60% compared to control null segregant seed. Further embodiments include methods to increase the total fatty acid content, protein content and alter (increase or decrease) the fatty acid composition of the transgenic seed comprising the polynucleotides and constructs described herein. The methods can also include alterations in the raffinose saccharide content, the total saturate content, the oleic acid content, the palmitic acid content, the linoleic acid content, and linolenic acid content of the transgenic seeds. In yet another embodiment the at least one regulatory sequence is a soybean sucrose synthase promoter or Medicago truncatula sucrose synthase promoter. Transgenic soybeans produced by the methods described herein are also included.

[0363] Any of the transgenic seed disclosed herein may comprise a recombinant construct having at least one DGAT sequence which can be selected from the group consisting of DGAT1, DGAT2 and DGAT1 in combination with DGAT2. Furthermore, the DGAT sequence can be a Yarrowia sequence or soybean sequence.

[0364] Any of the transgenic seed disclosed herein may comprise a recombinant construct having downregulated GAS activity.

[0365] Also within the scope of the invention are product(s), such as meal and/or by-product(s), such as lecithin, and progeny, obtained from the transgenic soybean seeds disclosed herein.

[0366] Transgenic soybean seed is provided exhibiting an at least 10% increase in total fatty acids when compared to a control null segregant soybean seed. It is understood that any measurable percent increase in the total fatty acids of a transgenic versus a non-transgenic, null segregant would be useful. Such percent increases in the total fatty acids may include, but are not limited to, at least 8%, 9%, 10%, 11%, 12%, 13%, 14%, 15%, 16%, 17%, 18%, 19%, 20%, 21%, 22%, 23%, 24%, 25%, 26%, 27%, 28%, 29%, 30%, 31%, 32%, 33%, 34%, 35%, 36%, 37%, 38%, 39%, or 40%.

[0367] Transgenic soybean seed is provided exhibiting a percent increase in protein of at least 1% when compared to a control null segregant seed. It is understood that any measurable percent increase protein in a transgenic versus control null segregant would be useful. Such percent increase in the protein may include, but are not limited to, at least 0.5%, 0.6%, 0.7%, 0.8%, 0.9%, 1%, 1.1%, 1.2%, 1.3%, 1.4%, 1.5%, 1.6%, 1.7%, 1.8%, 1.9%, 2.0%, 2.1%, 2.2%, 2.3%, 2.4%, 2.5%, 2.6%, 2.7%, 2.8%, 2.9%, 3.0%, 3.1%, 3.2%, 3.3%, 3.4%, 3.5%, 3.6%, 3.7%, 3.8%, 3.9%, 4.0%, 4.1%, 4.2%, 4.3%, 4.4%, 4.5%, 4.6%, 4.7%, 4.8%, 4.9%, 5.0%, 5.1%, 5.2%, 5.3%. 5.4%, 5.5.%, 5.6%, 5.7%, 5.8%, 5.9%, 6.0%, 6.1%, 6.2%, 6.3%, 6.4%, 6.5%, 7.0%, 7.5%, 8.0%, 8.5%, 8.6%, 8.7%, 8.8.%, 8.9%, 9.0%, 9.1%, 9.2%, 9.3%, 9.4%, 9.5%, 9.6%, 9.7%, 9.8%, 9.9%, 10.0%, 10.1%, 10.2%, 10.3%, 10.4%, 10.5%, 10.6%, 10.7%, 10.8%, 10.9%, 11.0%, 11.1%, 11.2%, 11.3%, 11.4%, 11.5%, 11.6%, 11.7%, 11.8%, 11.9%, 12.0%, 12.1%, 12.2%, 12.3%, 12.4%, 125%, 12.6%, 12.7%, 12.8%, 12.9%, 13.0%, 13.1%, 13.2%, 13.3%, 13.4%, 13.5%, 13.6%, 13.7%, 13.8%, 13.9%, 14.0%, 14.1%, 14.2%, 14.3% 14.4%, 14.5%, 14.6%, 14.7%, 14.8%, 14.9%, or 15.0%.

[0368] In another embodiment, meals are obtained from the transgenic soybean seed exhibiting an at least 1% increase in protein when compared to control meal obtained from a control null segregant soybean seed. It is understood that any measurable percent increase of protein in meals(s) obtained from a transgenic versus a control null segregant seed would be useful. Such percent increase in the protein may include, but are not limited to, at least 0.5%, 0.6%, 0.7%, 0.8%, 0.9%, 1%, 1.1%, 1.2%, 1.3%, 1.4%, 1.5%, 1.6%, 1.7%, 1.8%, 1.9%, 2.0%, 2.1%, 2.2%, 2.3%, 2.4%, 2.5%, 2.6%, 2.7%, 2.8%, 2.9%, 3.0%, 3.1%, 3.2%, 3.3%, 3.4%, 3.5%, 3.6%, 3.7%, 3.8%, 3.9%, 4.0%, 4.1%, 4.2%, 4.3%, 4.4%, 4.5%, 4.6%, 4.7%, 4.8%, 4.9%, 5.0%, 5.1%, 5.2%, 5.3%. 5.4%, 5.5.%, 5.6%, 5.7%, 5.8%, 5.9%, 6.0%, 6.1%, 6.2%, 6.3%, 6.4%, 6.5%, 7.0%, 7.5%, 8.0%, 8.5%, 8.6%, 8.7%, 8.8.%, 8.9%, 9.0%, 9.1%, 9.2%, 9.3%, 9.4%, 9.5%, 9.6%, 9.7%, 9.8%, 9.9%, 10.0%, 10.1%, 10.2%, 10.3%, 10.4%, 10.5%, 10.6%, 10.7%, 10.8%, 10.9%, 11.0%, 11.1%, 11.2%, 11.3%, 11.4%, 11.5%, 11.6%, 11.7%, 11.8%, 11.9%, 12.0%, 12.1%, 12.2%, 12.3%, 12.4%, 125%, 12.6%, 12.7%, 12.8%, 12.9%, 13.0%, 13.1%, 13.2%, 13.3%, 13.4%, 13.5%, 13.6%, 13.7%, 13.8%, 13.9%, 14.0%, 14.1%, 14.2%, 14.3% 14.4%, 14.5%, 14.6%, 14.7%, 14.8%, 14.9%, or 15.0%.

[0369] Meals obtained by the methods described herein exhibiting a percent increase of protein compared to a control meal obtained from a null segregant may include, but are not limited to percent increase of protein of at least 0.5%, 0.6%, 0.7%, 0.8%, 0.9%, 1%, 1.1%, 1.2%, 1.3%, 1.4%, 1.5%, 1.6%, 1.7%, 1.8%, 1.9%, 2.0%, 2.1%, 2.2%, 2.3%, 2.4%, 2.5%, 2.6%, 2.7%, 2.8%, 2.9%, 3.0%, 3.1%, 3.2%, 3.3%, 3.4%, 3.5%, 3.6%, 3.7%, 3.8%, 3.9%, 4.0%, 4.1%, 4.2%, 4.3%, 4.4%, 4.5%, 4.6%, 4.7%, 4.8%, 4.9%, 5.0%, 5.1%, 5.2%, 5.3%. 5.4%, 5.5.%, 5.6%, 5.7%, 5.8%, 5.9%, 6.0%, 6.1%, 6.2%, 6.3%, 6.4%, 6.5%, 7.0%, 7.5%, 8.0%, 8.5%, 8.6%, 8.7%, 8.8.%, 8.9%, 9.0%, 9.1%, 9.2%, 9.3%, 9.4%, 9.5%, 9.6%, 9.7%, 9.8%, 9.9%, 10.0%, 10.1%, 10.2%, 10.3%, 10.4%, 10.5%, 10.6%, 10.7%, 10.8%, 10.9%, 11.0%, 11.1%, 11.2%, 11.3%, 11.4%, 11.5%, 11.6%, 11.7%, 11.8%, 11.9%, 12.0%, 12.1%, 12.2%, 12.3%, 12.4%, 125%, 12.6%, 12.7%, 12.8%, 12.9%, 13.0%, 13.1%, 13.2%, 13.3%, 13.4%, 13.5%, 13.6%, 13.7%, 13.8%, 13.9%, 14.0%, 14.1%, 14.2%, 14.3% 14.4%, 14.5%, 14.6%, 14.7%, 14.8%, 14.9%, or 15.0%.

[0370] Transgenic soybean seed having altered (increased or decreased) fatty acid content when compared to the fatty acid content of control null segregant soybean seed are provided. Fatty acids altered may be oleic, stearic, palmitic, linoleic and linolenic acid.

[0371] It is understood that any measurable alteration (increase or decrease) in the total fatty acid content of a transgenic versus a control null segregant seed would be useful.

[0372] A percent decrease of palmitic acid in a transgenic versus a control null segregant may include, but is not limited to, at least 3.0%, 4.0%, 5.0%, 6.0%, 7.0%, 8.0%, 9.0%, 10.0%, 11.0%, 12.0%, 13.0%, 14.0%, 15.0%, 16.0%, 17.0%, 18.0%, 19.0%, 20.0%, 21.0 22.0%, 23.0%, 24.0%, 25.0%, 26.0%, 27.0%, 28.0%, 29.0%, 30.0%, 31.0%, 32.0%, 33.0%, 34.0%, 35.0%, 36.0%, 37.0%, 38.0%, 39.0%, 40.0%, 41.0%, 42.0%, 43.0%, 44.0%, 45.0%, 46.0%, 47.0%, 48.0%, 49.0%, 50.0%, 51.0%, 52.0%, 53.0%, 54.0%, 55.0%, 56.0%, 57.0%, 58.0%, 59.0%, 60.0%, 61.0%, 62.0%, 63.0%, 64.0%, 65.0%, 66.0%, 67.0%, 68.0%, 69.0%, 70.0%, 71.0%, 72.0%, 73.0%, 74.0%, 75.0%, 76.0%, 77.0%, 78.0%, 79.0%, 80.0%, 81.0%, 82.0%, 83.0%, 84.0%, 85.0%, 86.0%, 87.0%, 88.0%, 89.0%, 90.0%, 91.0%, 92.0%, 93.0%, 94.0%, 95.0%, 96%, 97%, 98%, 99%, or 100%.

[0373] A percent decrease of stearic acid in a transgenic versus a control null segregant may include, but is not limited to, at least 3.0%, 4.0%, 5.0%, 6.0%, 7.0%, 8.0%, 9.0%, 10.0%, 11.0%, 12.0%, 13.0%, 14.0%, 15.0%, 16.0%, 17.0%, 18.0%, 19.0%, 20.0%, 21.0 22.0%, 23.0%, 24.0%, 25.0%, 26.0%, 27.0%, 28.0%, 29.0%, 30.0%, 31.0%, 32.0%, 33.0%, 34.0%, 35.0%, 36.0%, 37.0%, 38.0%, 39.0%, 40.0%, 41.0%, 42.0%, 43.0%, 44.0%, 45.0%, 46.0%, 47.0%, 48.0%, 49.0%, or 50.0%.

[0374] A percent increase of stearic acid in a transgenic versus a control null segregant may include, but is not limited to, at least 5.0%, 6.0%, 7.0%, 8.0%, 9.0%, 10.0%, 11.0%, 12.0%, 13.0%, 14.0%, 15.0%, 16.0%, 17.0%, 18.0%, 19.0%, 20.0%, 21.0 22.0%, 23.0%, 24.0%, 25.0%, 26.0%, 27.0%, 28.0%, 29.0%, 30.0%, 31.0%, 32.0%, 33.0%, 34.0%, 35.0%, 36.0%, 37.0%, 38.0%, 39.0%, 40.0%, 41.0%, 42.0%, 43.0%, 44.0%, 45.0%, 46.0%, 47.0%, 48.0%, 49.0%, or 50.0%.

[0375] A percent increase of oleic acid in a transgenic versus a control null segregant may include, but is not limited to, at least 20%, 25%, 30%, 35%, 40%, 45%, 50%, 55%, 60%, 65%, 70%, 75%, 80%, 85%, 90%, 95%, 100%, 150%, 160%, 170%, 180%, 190%, 200%, 210%, 220%, 230%, 240%, 250%, 260%, 270%, 280%, 290%, 300%, 310%, 320%, 330%, 340%, 350%, 360%, 370%, 380%, 390%, 400%, 410%, 420%, 430%, 440%, 450%, or 500%.

[0376] A percent decrease in linoleic acid content of a transgenic versus control a control null segregant may include, but is not limited to, at least 3.0%, 4.0%, 5.0%, 6.0%, 7.0%, 8.0%, 9.0%, 10.0%, 11.0%, 12.0%, 13.0%, 14.0%, 15.0%, 16.0%, 17.0%, 18.0%, 19.0%, 20.0%, 21.0 22.0%, 23.0%, 24.0%, 25.0%, 26.0%, 27.0%, 28.0%, 29.0%, 30.0%, 31.0%, 32.0%, 33.0%, 34.0%, 35.0%, 36.0%, 37.0%, 38.0%, 39.0%, 40.0%, 41.0%, 42.0%, 43.0%, 44.0%, 45.0%, 46.0%, 47.0%, 48.0%, 49.0%, 50.0%, 51.0%, 52.0%, 53.0%, 54.0%, 55.0%, 56.0%, 57.0%, 58.0%, 59.0%, 60.0%, 61.0%, 62.0%, 63.0%, 64.0%, 65.0%, 66.0%, 67.0%, 68.0%, 69.0%, 70.0%, 71.0%, 72.0%, 73.0%, 74.0%, 75.0%, 76.0%, 77.0%, 78.0%, 79.0%, 80.0%, 81.0%, 82.0%, 83.0%, 84.0%, 85.0%, 86.0%, 87.0%, 88.0%, 89.0%, 90.0%, 91.0%, 92.0%, 93.0%, 94.0%, 95.0%, 96%, 97%, 98%, 99%, or 100%.

[0377] A percent increase of linoleic acid in a transgenic versus a control null segregant may include, but is not limited to, at least 0.5%, 1.0%, 3.0%, 4.0%, 5.0%, 6.0%, 7.0%, 8.0%, 9.0%, or 10.0%.

[0378] A percent decrease of linolenic acid in a transgenic versus a control null segregant may include, but is not limited to, at least 50.0%, 51.0%, 52.0%, 53.0%, 54.0%, 55.0%, 56.0%, 57.0%, 58.0%, 59.0%, 60.0%, 61.0%, 62.0%, 63.0%, 64.0%, 65.0%, 66.0%, 67.0%, 68.0%, 69.0%, 70.0%, 71.0%, 72.0%, 73.0%, 74.0%, 75.0%, 76.0%, 77.0%, 78.0%, 79.0%, 80.0%, 81.0%, 82.0%, 83.0%, 84.0%, 85.0%, 86.0%, 87.0%, 88.0%, 89.0%, 90.0%, 91.0%, 92.0%, 93.0%, 94.0%, 95.0%, 96%, 97%, 98%, or 99%.

[0379] A percent decrease in total saturates (saturated fatty acids) in a transgenic versus a control null segregant may include, but is not limited to, at least 5.0%, 6.0%, 7.0%, 8.0%, 9.0%, 10.0%, 11.0%, 12.0%, 13.0%, 14.0%, 15.0%, 16.0%, 17.0%, 18.0%, 19.0%, 20.0%, 21.0 22.0%, 23.0%, 24.0%, 25.0%, 26.0%, 27.0%, 28.0%, 29.0%, 30.0%, 31.0%, 32.0%, 33.0%, 34.0%, 35.0%, 36.0%, 37.0%, 38.0%, 39.0%, 40.0%, 41.0%, 42.0%, 43.0%, 44.0%, 45.0%, 46.0%, 47.0%, 48.0%, 49.0%, 50.0%, 51.0%, 52.0%, 53.0%, 54.0%, 55.0%, 56.0%, 57.0%, 58.0%, 59.0%, 60.0%, 61.0%, 62.0%, 63.0%, 64.0%, 65.0%, 66.0%, 67.0%, 68.0%, 69.0%, 70.0%, 71.0%, 72.0%, 73.0%, 74.0%, 75.0%, 76.0%, 77.0%, 78.0%, 79.0%, or 80.0%.

[0380] A percent decrease of total raffinosaccharides in a transgenic versus a control such as a non-transgenic, null segregant seed may include, but is not limited to, at least 50.0%, 51.0%, 52.0%, 53.0%, 54.0%, 55.0%, 56.0%, 57.0%, 58.0%, 59.0%, 60.0%, 61.0%, 62.0%, 63.0%, 64.0%, 65.0%, 66.0%, 67.0%, 68.0%, 69.0%, 70.0%, 71.0%, 72.0%, 73.0%, 74.0%, 75.0%, 76.0%, 77.0%, 78.0%, 79.0%, 80.0%, 81.0%, 82.0%, 83.0%, 84.0%, 85.0%, 86.0%, 87.0%, 88.0%, 89.0%, 90.0%, 91.0%, 92.0%, 93.0%, 94.0%, 95.0%, 96%, 97%, 98%, or 99%.

[0381] A percent decrease of total carbohydrates in a transgenic versus a control null segregant seed may include, but is not limited to, at least 5.0%, 6.0%, 7.0%, 8.0%, 9.0%, 10.0%, 11.0%, 12.0%, 13.0%, 14.0%, 15.0%, 16.0%, 17.0%, 18.0%, 19.0%, 20.0%, 21.0 22.0%, 23.0%, 24.0%, 25.0%, 26.0%, 27.0%, 28.0%, 29.0%, 30.0%, 31.0%, 32.0%, 33.0%, 34.0%, 35.0%, 36.0%, 37.0%, 38.0%, 39.0%, or 40.0%.

[0382] A percent increase of total sucrose in a transgenic versus a control null segregant may include, but is not limited to, at least 4.0%, 5.0%, 6.0%, 7.0%, 8.0%, 9.0%, 10.0%, 11.0%, 12.0%, 13.0%, 14.0%, 15.0%, 16.0%, 17.0%, 18.0%, 19.0%, 20.0%, 21.0 22.0%, 23.0%, 24.0%, 25.0%, 26.0%, 27.0%, 28.0%, 29.0%, 30.0%, 31.0%, 32.0%, 33.0%, 34.0%, 35.0%, 36.0%, 37.0%, 38.0%, 39.0%, or 40.0%.

[0383] In some cases no percent change of protein in the transgenic compared to a control null segregant seed or a percent decrease of protein may be observed. The percent decrease of protein in the transgenic seed compared to the a control null segregant seed may be at least 1%, 2%, 3%, 4%, 5%, 6%, 7%, 8%, 9% or 10%.

[0384] In some embodiments the sum of the percent increase of total fatty acids (oil) and the percent increase of protein in the transgenic versus a control null segregant seed may include, but is not limited to, at least 1.0%, 2.0%, 3.0%, 4.0%, 5.0%, 6.0%, 7.0%, 8.0%, 9.0%, 10.0%, 11.0%, 12.0%, 13.0%, 14.0%, 15.0%, 16.0%, 17.0%, 18.0%, 19.0%, 20.0%, 21.0 22.0%, 23.0%, 24.0%, 25.0%, 26.0%, 27.0%, 28.0%, 29.0%, 30.0%, 31.0%, 32.0%, 33.0%, 34.0%, 35.0%, 36.0%, 37.0%, 38.0%, 39.0%, or 40.0%.

[0385] In some embodiments, transgenic seed(s) exhibit a percent decrease of palmitic, linoleic and linolenic acid when compared to control seed(s). In yet another embodiment transgenic seed(s) exhibit a percent increase of oleic acid when compared to a control null segregant seed. The percent increase of oleic acid can be by at least 25% compared to a control null segregant seed. In an additional embodiment transgenic seed (s) exhibit a percent decrease of total compared to a control null segregant seed(s), It is understood that any measurable percent change of total fatty acids (oil) in a transgenic versus a control null segregant seed would be useful. Furthermore, any percent increases of protein in a transgenic versus a control null segregant seed(s) would be useful, such percent increases in the protein may include, but are not limited to, at least 0.8%, 0.9% 1%, 1.1%, 1.2%, 1.3%, 1.4%, 1.5%, 1.6%, 1.7%, 1.8%, 1.9%, 2.0%, 2.1%, 2.2%, 2.3%, 2.4%, 2.5%, 2.6%, 2.7%, 2.8%, 2.9%, 3.0%, 3.1%, 3.2%, 3.3%, 3.4%, 3.5%, 3.6%, 3.7%, 3.8%, 3.9%, 4.0%, 4.1%, 4.2%, 4.3%, 4.4%, 4.5%, 4.6%, 4.7%, 4.8%, 4.9%, 5.0%, 5.1%, 5.2%, 5.3%. 5.4%, 5.5.%, 5.6%, 5.7%, 5.8%, 5.9%, 6.0%, 6.1%, 6.2%, 6.3%, 6.4%, 6.5%, 7.0%, 7.5%, 8.0%, 8.5%, 8.6%, 8.7%, 8.8.%, 8.9%, 9.0%, 9.1%, 9.2%, 9.3%, 9.4%, 9.5%, 9.6%, 9.7%, 9.8%, 9.9%, 10.0%, 10.1%, 10.2%, 10.3%, 10.4%, 10.5%, 10.6%, 10.7%, 10.8%, 10.9%, 11.0%, 11.1%, 11.2%, 11.3%, 11.4%, 11.5%, 11.6%, 11.7%, 11.8%, 11.9%, 12.0%, 12.1%, 12.2%, 12.3%, 12.4%, 125%, 12.6%, 12.7%, 12.8%, 12.9%, 13.0%, 13.1%, 13.2%, 13.3%, 13.4%, 13.5%, 13.6%, 13.7%, 13.8%, 13.9%, 14.0%, 14.1%, 14.2%, 14.3% 14.4%, 14.5%, 14.6%, 14.7%, 14.8%, 14.9%, or 15.0%.

[0386] It will be apparent to those of skill in the art that variations may be applied to the compositions and methods described herein and in the steps or in the sequence of steps of the methods described herein without departing from the concept, spirit and scope of the invention. More specifically, it will be apparent that certain agents which are both chemically and physiologically related may be substituted for the agents described herein while the same or similar results would be achieved. All such similar substitutes and modifications apparent to those skilled in the art are deemed to be within the spirit, scope and concept of the invention.

[0387] It is to be understood that the invention is not limited in its application to the details of construction and the arrangement of components set forth in the following description. Also, it is to be understood that the phraseology and terminology used herein is for the purpose of description and should not be regarded as limiting. The use of “including,” “comprising,” or “having” and variations thereof herein is meant to encompass the items listed thereafter and equivalents thereof as well as additional items.

[0388] It also is understood that any numerical range recited herein includes all values from the lower value to the upper value. For example, if a concentration range is stated as 1% to 50%, it is intended that values such as 2% to 40%, 10% to 30%, or 1% to 3%, etc., are expressly enumerated in this specification. These are only examples of what is specifically intended, and all possible combinations of numerical values between and including the lowest value and the highest value enumerated are to be considered to be expressly stated in this application.

[0389] All patents and patent applications mentioned in this application are incorporated by reference herein in their entireties for all purposes. In case of conflict between the present disclosure and that of a patent or publication incorporated by reference, the present disclosure controls.

[0390] The following non-limiting examples are purely illustrative.

### EXAMPLES

[0391] In the following Examples parts and percentages are by weight and degrees are Celsius, unless otherwise stated.

[0392] The meaning of abbreviations is as follows: “sec” means second(s), “min” means minute(s), “h” means hour(s), “d” means day(s), “μL” means microliter(s), “mL” means milliliter(s), “L” means liter(s), “μM” means micro molar, “mM” means millimolar, “M” means molar, “mmol” means millimole(s), “μmole” mean micromole(s), “g” means gram(s), “μg” means microgram(s), “ng” means nanogram(s), “U” means unit(s), “bp” means base pair(s) and “kB” means kilobase(s).

### Example 1

### Constructs for Generating Soybean Lines with Seed-Targeted Silencing of Galactinol Synthase and Fad3 and Seed Targeted Over-Expression of DGAT Enzymes

[0393] Using standard PCR and cloning methods, a 776 by fragment of the soy annexin promoter (U.S. Pat. No. 7,129,089, issued Oct. 31, 2006) was combined with the NotI fragment of pKR1756 (SEQ ID NO:1), containing the 159-fad3c amiRNA precursor (SEQ ID NO:2) and the soy BD30 transcription terminator from pKR268 (U.S. Pat. No. 8,013,215, issued Sep. 6, 2011) resulting in the BsiWI/SbfI fragment of SEQ ID NO:3 (called Ann-fad3c-BD30).

[0394] The Ann-fad3c-BD30 SbfI/BsiWI fragment (SEQ ID NO:3) was cloned into the SbfI/BsiWI fragment of pKR277 (SEQ ID NO:4) to produce pKR1850 (SEQ ID NO:5).

Stacking fad3c amiRNA Cassette with YLDGAT2

[0395] Construction of a plasmid containing the Yarrowia DGAT2 gene flanked by the soy beta-conglycinin promoter and the phaseolin terminator was described for KS362 (SEQ ID NO:6) in Example 4 of U.S. Pat. No. 8,143,473; issued Mar. 27, 2012. Using standard PCR, restriction digest and cloning methods, BsiWI restriction sites were added flanking the beta-conglycin/YLDGAT2/phaseolin cassette of KS362 (SEQ ID NO:6), resulting in the BsiWI fragment of SEQ ID NO:7

[0396] The BsiWI fragment containing the beta-conglycin/YLDGAT2/phaseolin cassette (SEQ ID NO:7) was cloned into the BsiWI site of pKR1850 (SEQ ID NO:5) to produce pKR1975 (SEQ ID NO:8).

Site-Specific Integration Donor Vector Stacking the fad3c amiRNA and Galactinol Synthase Silencing Cassettes with YLDGAT2

[0397] The yeast FLP/FRT site specific recombination system has been shown to function in plants. Earlier, the system was utilized for excision of unwanted DNA. See, Lyznik et al. (1993) Nucleic Acid Res. 21:969-975. Subsequently, non-identical FRTs were used for the exchange, targeting, arrangement, insertion and control of expression of nucleotide sequences into the plant genome (PCT Publication No. WO1999025821; PCT Publication No. WO1999025840; PCT Publication No. WO1999025854; PCT Publication No. 1999025855; and PCT Publication No. WO2007011733; the contents of all of which are herein incorporated by reference).

[0398] Constructs and methods for FLP/FRT site specific recombination to achieve recombinase mediated cassette exchange (RMCE) for stacking gene cassettes in soy are described in U.S. Pat. No. 8,293,533 issued Oct. 23, 2012, the contents of which are herein incorporated by reference.

[0399] Using standard PCR and cloning methods by one skilled in the art, the following DNA elements were assembled to produce a 5195 by basic donor construct QC632 (SEQ ID NO:9).

[0400] Sequence 70-117 of QC632 (SEQ ID NO:9) is a FLP recombinase recognition site FRT1 (U.S. Pat. No. 8,293,533 issued Oct. 23, 2012). Sequence 132-2087 is the soybean acetolactate synthase (als) gene coding region encoding a mutant ALS enzyme insensitive to sulfonylurea herbicides and having a P178A mutation in the encoded protein (described in U.S. Pat. No. 5,378,824, issued Jan. 3, 1995). Sequence 2104-2414 is the potato proteinase II inhibitor gene (PINII) terminator (SEQ 10). Sequence 2471-2518 is a FLP recombinase recognition site FRT6 (described in U.S. Pat. No. 8,293,533 issued Oct. 23, 2012). Sequence 2608-2655 is a FLP recombinase recognition site FRT87 (described previously in U.S. Pat. No. 8,293,533 issued Oct. 23, 2012). Sequence 2668-5189 is vector backbone (described previously in U.S. Pat. No. 8,293,533 issued Oct. 23, 2012) containing the T7 promoter (sequence 3903-3998), the hygromycin phosphotransferase (hpt) gene coding region (sequence 3999-5021) and the T7 terminator (sequence 5046-5178).

[0401] Plasmid QC632 (SEQ ID NO:9) was digested with SmaI and EcoRV in order to remove the FLP recombinase recognition FRT6 site. The remaining 5193 bp fragment was re-ligated to produce pKR1763 (SEQ ID NO:11).

[0402] Using standard PCR, restriction digests and cloning techniques, a DNA fragment of the 3′ transcription terminator region of the phaseolin gene with flanking ORFstop sequences (ORFstopA and ORFstopB as well as flanking BsiWi/MluI sites (SEQ ID NO:12) was produced, digested with BsiWI/MluI and cloned into the AscI/Acc651 of pKR1763 (SEQ ID NO:11) to produce pKR1849 (SEQ ID NO:13).

[0403] A unique SbfI site in pKR1849 (SEQ ID NO:13) was removed by digestion with SbfI, 51 nuclease treatment and re-ligation to produce pKR1857 (SEQ ID NO:14).

[0404] Donor construct pKR1857 (SEQ ID NO:14) is a 6341 by construct comprising the following DNA elements.

[0405] Sequence 45-92 is a FLP recombinase recognition site FRT1. Sequence 107-2062 is the soybean acetolactate synthase (als) gene coding region encoding a mutant ALS enzyme insensitive to sulfonylurea herbicides and having a P178A mutation in the encoded protein. Sequence 2079-2389 is the potato proteinase II inhibitor gene (PINII) terminator. Sequence 2425-2440 is a sequence of DNA comprising ORF stop codons in all 6 frames (ORFSTOP-A). Sequence 2443-3612 is the phaseolin transcription terminator. Sequence 3644-3660 is a sequence of DNA comprising ORF stop codons in all 6 frames (ORFSTOP-B). Sequence 3733-3780 is a FLP recombinase recognition site FRT87. Sequence 3793-6314 is vector backbone containing the T7 promoter (sequence 5028-5123), the hygromycin phosphotransferase (hpt) gene coding region (sequence 5124-6146) and the T7 terminator (sequence 6171-6303).

[0406] The AscI fragment of pKR1975 (SEQ ID NO:8), containing the fad3c amiRNA and YLDGAT2 cassettes, was cloned into the AscI site of pKR1857 (SEQ ID NO:14) to produce pKR1980 (SEQ ID NO:15).

[0407] A hairpin construct comprising polynucleotide fragments of the galactinol synthase 1 (GAS1, described in Applicants' Assignee's U.S. Pat. No. 5,648,210; Issued Jul. 15, 1997), galactinol synthase 2 (GAS2; Applicants' Assignee's U.S. Pat. No. 6,967,262; Issued Nov. 22, 2005) and galactinol synthase 3 (GAS3; described in Applicants' Assignee's U.S. Pat. No. 7,294,756 B2; Issued Nov. 11, 2007) in the stem structure and a potato ST-LS1 intron2 in the loop structure was produced by standard PCR methods, similar to those described in Example 27, resulting in the Not1 fragment of SEQ ID NO:16 (called Gas123 hp).

[0408] The NotI fragment containing Gas123 hp (SEQ NO:16) was cloned into the NotI site of pKR1273 (SEQ ID NO:17) to produce pKR1292 (SEQ ID NO:18). In pKR1292 (SEQ ID NO:18), the Gas123 hp (SEQ NO:16) is cloned behind the soy KTi promoter and the complete cassette is flanked by SbfI restriction enzyme sites.

[0409] The SbfI fragment of pKR1292 (SEQ ID NO:18) was cloned into the SbfI site of pKR1980 (SEQ ID NO: 15) to produce pKR1986 (SEQ ID NO:19). In this way, YLDGAT2 overexpression and fad3 and galactinol synthase gene silencing cassettes were stacked together in one SSI donor construct. Plasmid pKR1986 (SEQ ID NO:19) was also given the designation PHP50573.

### Constructing a FLP Recombinase Expression Plasmid (PHP44664)

[0410] The construction of the 4860 by FLP recombinase expression plasmid QC292 (SEQ ID NO:20) was described previously in U.S. Pat. No. 8,293,533 issued Oct. 23, 2012.

[0411] Using common methods familiar to one skilled in the art, the ampicillin selection fragment of QC292 (SEQ ID NO:20) was replaced with a hygromycin selection fragment to produce QC608 (SEQ ID NO:21). Plasmid QC608 (SEQ ID NO:21) was also given the designation PHP44664.

[0412] In PHP44664 (SEQ ID NO:21), sequence 47-532 is the constitutive promoter SCP1. Sequence 539-611 is the OMEGA 5′ UTR. Sequence 626-1897 is a codon optimized FLP recombinase coding region. Sequence 1904-2213 is the PINII terminator. Sequence 2214-4747 is vector backbone containing the T7 promoter (sequence 3455-3550), the hygromycin phosphotransferase (hpt) gene coding region (sequence 3551-4573) and the T7 terminator (sequence 4598-4730).

### Example 2

### Raffinose Family Oligosaccharide (RFO) Analysis in Transgenic Soybean Somatic Embryos and Soybean Seeds

[0413] Individual immature soybean embryos were dried-down (by transferring them into an empty small Petri dish that was seated on top of a 10 cm Petri dish containing some agar gel to allow slow dry down) to mimic the last stages of soybean seed development. Dried-down embryos are capable of producing plants when transferred to soil or soil-less media. Storage products produced by embryos at this stage are similar in composition to storage products produced by zygotic embryos at a similar stage of development. The storage product profile is predictive of plants derived from a somatic embryo line (PCT Publication No. WO 94/11516, published on May 26, 1994). Raffinose Family Oligosaccharides (raffinose, stachyose) of transgenic somatic embryos containing recombinant expression construct of the invention were measured by thin layer chromatography. Somatic embryos were extracted with hexane then dried. The dried material was re-suspended in 80% methanol, incubated at room temperature for 1-2 hours, centrifuged, and 2 μl of the supernatant is spotted onto a TLC plate (Kieselgel 60 CF, from EM Scientific, Gibbstown, N.J.; Catalog No. 13749-6). The TLC was run in ethylacetate: isopropanol:20% acetic acid (3:4:4) for 1-1.5 hours. The air dried plates were sprayed with 2% sulfuric acid and heated until the charred sugars were detected. Somatic embryos expressing the GAS suppression construct showed reduced levels of raffinose sugars (raffinose and stachyose) when compared to untransformed wild type soybean (WT) somatic embryos.

[0414] Mature soybean T1 and T2 seeds derived from events expressing the GAS suppression construct were chipped and the chips were analyzed by TLC as described above. Seed from derived from events expressing the GAS construct showed reduced levels of raffinose sugars (raffinose and stachyose) when compared to untransformed wild type soybean (WT) seeds.

### Example 3

### Analysis of Seed Oil Content

### NMR Based Analysis of Seed Oil Content and Fatty Acid Composition Determined by GC-FAME:

[0415] Seed oil content was determined using a Maran Ultra NMR analyzer (Resonance Instruments Ltd, Whitney, Oxfordshire, UK). Samples (either individual soybean seed or batches of Arabidopsis seed ranging in weight between 5 and 200 mg) were placed into pre-weighed 2 mL polypropylene tubes (Corning Inc, Corning N.Y., USA; Part no. 430917) previously labeled with unique bar code identifiers. Samples were then placed into 96 place carriers and processed through the following series of steps by an Adept Cobra 600 SCARA robotic system.
[0416] 1. pick up tube (the robotic arm was fitted with a vacuum pickup devise)
[0417] 2. read bar code
[0418] 3. expose tube to antistatic device (ensured that Arabidopsis seed were not adhering to the tube walls)
[0419] 4. weigh tube (containing the sample), to 0.0001 g precision.
[0420] 5. NMR reading; measured as the intensity of the proton spin echo 1 msec after a 22.95 MHz signal had been applied to the sample (data was collected for 32 NMR scans per sample)
[0421] 6. return tube to rack
[0422] 7. repeat process with next tube
   Bar codes, tubes weights and NMR readings were recorded by a computer connected to the system. Sample weight was determined by subtracting the polypropylene tube weight from the weight of the tube containing the sample.

[0423] Seed oil content of soybeans seed was calculated as follows:

$$\% oil ( \% wt basis ) = \frac{( NMR signal / sample wt ( g ) ) - 70.58 )}{351.45}$$

[0424] Calibration parameters were determined by precisely weighing samples of soy oil (ranging from 0.0050 to 0.0700 g at approximately 0.0050 g intervals; weighed to a precision of 0.0001 g) into Corning tubes (see above) and subjecting them to NMR analysis. A calibration curve of oil content (% seed wt basis; assuming a standard seed weight of 0.1500 g) to NMR value was established.

[0425] The relationship between seed oil contents measured by NMR and absolute oil contents measured by classical analytical chemistry methods was determined as follows. Fifty soybean seed, chosen to have a range of oil contents, were dried at 40° C. in a forced air oven for 48 h. Individual seeds were subjected to NMR analysis, as described above, and were then ground to a fine powder in a GenoGrinder (SPEX Centriprep (Metuchen, N.J., U.S.A.); 1500 oscillations per minute, for 1 minute). Aliquots of between 70 and 100 mg were weighed (to 0.0001 g precision) into 13×100 mm glass tubes fitted with Teflon® lined screw caps; the remainder of the powder from each bean was used to determine moisture content, by weight difference after 18 h in a forced air oven at 105° C. Heptane (3 mL) was added to the powders in the tubes and after vortex mixing samples were extracted, on an end-over-end agitator, for 1 h at room temperature. The extracts were centrifuged, 1500×g for 10 min, the supernatant decanted into a clean tube and the pellets were extracted two more times (1 h each) with 1 mL heptane. The supernatants from the three extractions were combined and 50 μL internal standard (triheptadecanoic acid; 10 mg/mL toluene) was added prior to evaporation to dryness at room temperature under a stream of nitrogen gas; standards containing 0, 0.0050, 0.0100, 0.0150, 0.0200 and 0.0300 g soybean oil, in 5 mL heptane, were prepared in the same manner. Fats were converted to fatty acid methyl esters (FAMEs) by adding 1 mL 5% sulfuric acid (v:v. in anhydrous methanol) to the dried pellets and heating them at 80° C. for 30 min, with occasional vortex mixing. The samples were allowed to cool to room temperature and 1 mL 25% aqueous sodium chloride was added followed by 0.8 mL heptane. After vortex mixing the phases were allowed to separate and the upper organic phase was transferred to a sample vial and subjected to GC analysis.

[0426] Plotting NMR determined oil contents versus GC determined oil contents resulted in a linear relationship between 9.66 and 26.27% oil (GC values; percent seed wt basis) with a slope of 1.0225 and an R² of 0.9744; based on a seed moisture content that averaged 2.6+/−0.8%.

[0427] GC analysis of FAME was employed to investigate if the fatty acid profile of transgenics was altered (increased or decreased) compared to non-transgenic null segregants. Seed were dispensed into individual wells of 96 well strip tubes. For transesterification, 50 μL of trimethylsulfonium hydroxide (TMSH) and 0.5 mL of hexane were added to the each strip tube and incubated for 30 min at room temperature while shaking. Fatty acid methyl esters (1 μL injected from hexane layer) were separated and quantified using a Hewlett-Packard 6890 Gas Chromatograph fitted with an Omegawax 320 fused silica capillary column (Catalog #24152, Supelco Inc.). The oven temperature was programmed to hold at 220° C. for 2.6 min, increase to 240° C. at 20° C./min and then hold for an additional 2.4 min. Carrier gas was supplied by a Whatman hydrogen generator. Retention times were compared to those for methyl esters of standards commercially available (Nu-Chek Prep, Inc.).

### Example 4

### Generation of Soybean Lines with Seed-Targeted Silencing of Galactinol Synthase and Fad3 and Seed Targeted Over-Expression of DGAT Enzymes

[0428] Transformation into Soy SSI Target Events

[0429] Transgenic SSI target events were produced with the target DNA fragment QC288A as described previously in U.S. Pat. No. 8,293,533 issued Oct. 23, 2012. One target event described in U.S. Pat. No. 8,293,533 issued Oct. 23, 2012, 4729.5.1, also called the “A” line, was chosen to be re-transformed. Target line A contains a well characterized cassette from QC288A having frt1 and frt87 recombination sites with the constitutive SCP1 promoter upstream of the frt1 site.

[0430] Suspension cultures were initiated from developing embryos from homozygous plants of target line A using methods described herein.

[0431] Target line A cultures were retransformed with the donor construct PHP50573 (SEQ ID NO:19) and the FLP recombinase construct PHP44664 (SEQ ID NO:21) using intact plasmid at a 9:3 pg/bp/prep ratio with the biolistic bombardment transformation protocol described herein and using 90 ng/ml chlorsulfuron (DuPont, Wilmington, Del., USA) as the selection agent. The experiment name given for this transformation was Soil19.

[0432] Soil19 events created through RMCE bring the promoter-less als(P178A) coding region of donor construct PHP50573 (SEQ ID NO:19) downstream of the scp1 promoter of QC288A in target line A for expression and thus chlorsulfuron resistance. When the frt1 and frt87 sites from Target line A recombine with those in plasmid PHP70573 in a successful recombination mediated cassette exchange (RMCE), a new 15,646 by DNA sequence is generated in the genomic DNA as set forth in SEQ ID NO:22.

[0433] In SEQ ID NO:22, sequence 1-486 is the SCP promoter from Target Line A. Sequence 493-565 is the OMEGA 5′ UTR. Sequence 573-620 is a FLP recombinase recognition site FRT1. Sequence 635-2590 is the soybean acetolactate synthase (als) gene coding region encoding a mutant ALS enzyme insensitive to sulfonylurea herbicides and having a P178A mutation in the encoded protein. Sequence 2607-2917 is the potato proteinase II inhibitor gene (PINII) terminator. Sequence 2953-2968 is a sequence of DNA comprising ORF stop codons in all 6 frames (ORFSTOP-A). Sequence 2971-4140 is the phaseolin transcription terminator. Sequence 4182-4793 is the soy beta-conglycinin promoter. Sequence 4800-6344 is the YLDGAT2 gene. Sequence 6347-7511 is the phaseolin transcription terminator. Sequence 7512-8287 is the soy annexin promoter. Sequence 8294-9252 is the 159-fad3c amiRNA precursor. Sequence 9254-9474 is the soy BD30 transcription terminator. Sequence 9512-11598 is the soy Kunitz Trypsin inhibitor 3 (KTi3) promoter. Sequence 11613-14986 is the GAS123 hairpin. Sequence 14997-15198 is the soy KTi3 transcription terminator. Sequence 9254-9474 is the soy BD30 transcription terminator. Sequence 15202-15483 is the soy albumin transcription terminator. Sequence 15510-11526 is a sequence of DNA comprising ORF stop codons in all 6 frames (ORFSTOP-B). Sequence 15599-15646 is a FLP recombinase recognition site FRT87.

### T0 Embryo and Plant Analysis and Event Selection

[0434] Resulting transgenic Soil19 events were selected, maintained and somatic embryos matured as described herein.

[0435] Soil19 events were sampled at the somatic embryo stage and screened using construct-specific quantitative PCR (qPCR) as described previously in U.S. Pat. No. 8,293,533 issued Oct. 23, 2012 with oligos designed to check for DNA recombination around the FRT1 site and to check for the presence of target, donor, and Flp DNA. Somatic embryos from those Soil19 events that were positive for correct recombination around the FRT1 site were also analyzed for fatty acid profile using GC-FAME and oil content by NMR on ground embryo powder with methods exactly as described herein. The results for the qPCR, fatty acid and oil analysis of Soil19 events are shown in Table 2. Based on the qPCR, fatty acid composition and oil content data, events were kept as indicated in Table 2. Unless otherwise indicated herein, fatty acids (or respective methyl esters) are always identified as palmitic acid (16:0), stearic acid (18:0), oleic acid (18:1), linoleic acid (18:2) and alpha-linolenic acid (18:3; sometimes referred to as linolenic acid).

TABLE 2
qPCR, fatty acid composition and oil content of embryos from experiment Soil19.

| Soil19 | Fatty Acid Composition | | | | | | | | | | Event |
|---|---|---|---|---|---|---|---|---|---|---|---|
| Event | (wt. %) | | | | | | qPCR Result | | | | Keep |
| (AFS) | 16:0 | 18:0 | 18:1 | 18:2 | 18:3 | % Oil | FRT1 | Donor | Target | FLP | Status |
| 8407-1-1 | 14.9 | 4.1 | 25.3 | 44.8 | 10.8 | 4.8 | 1.44 | 0.00 | 0.00 | 0.00 | Keep |
| 8407-2-1 | 13.2 | 5.2 | 31.4 | 45.3 | 4.9 | 7.0 | 1.43 | 0.00 | 0.00 | 0.00 | Keep |
| 8407-2-2 | 15.3 | 5.2 | 22.4 | 49.0 | 8.1 | 4.7 | 1.28 | 0.00 | 0.30 | 0.00 | Keep |
| 8377-1-1 | 14.1 | 4.5 | 23.2 | 46.6 | 11.5 | 4.9 | 0.29 | 0.14 | 0.86 | 0.00 | Keep |
| 8377-1-2 | 12.9 | 4.8 | 30.1 | 42.7 | 9.4 | 6.4 | 0.86 | 0.00 | 0.00 | 0.00 | Keep |
| 8377-1-3 | 12.6 | 4.7 | 24.7 | 44.3 | 13.7 | 3.8 | 1.62 | 0.00 | 44.87 | 0.00 | Keep |
| 8377-1-4 | 14.1 | 5.0 | 29.4 | 47.1 | 4.4 | 6.8 | 1.60 | 0.75 | 0.64 | 0.00 | Keep |
| 8377-4-6 | 15.4 | 5.8 | 22.8 | 47.0 | 9.0 | 3.1 | 1.85 | 0.00 | 0.45 | 0.00 | Keep |
| 8377-5-1 | 13.7 | 5.7 | 27.9 | 47.2 | 5.4 | 3.0 | 0.00 | 0.62 | 0.00 | 0.96 | Throw |
| 8377-5-2 | 13.7 | 4.1 | 24.0 | 47.8 | 10.4 | 5.1 | 0.00 | 0.00 | 0.36 | 0.00 | Throw |
| 8377-5-3 | 12.6 | 4.5 | 26.2 | 49.4 | 7.4 | 4.9 | 2.14 | 0.00 | 0.78 | 0.00 | Keep |
| 8377-5-4 | 15.4 | 4.4 | 20.4 | 49.9 | 9.9 | 4.0 | 1.74 | 0.00 | 0.75 | 1.23 | Keep |
| 8377-5-5 | 14.0 | 4.8 | 26.9 | 45.4 | 9.0 | 7.3 | 0.00 | 0.50 | 0.85 | 0.00 | Throw |
| 8377-5-6 | 12.2 | 5.0 | 26.5 | 48.6 | 7.7 | 6.7 | 0.00 | 0.48 | 0.00 | 0.00 | Throw |

[0436] Somatic embryos from kept Soil19 events were dried, germinated and planted and resulting T0 plants were grown as described herein.

[0437] Genomic DNA was isolated from T0 plant leaf tissue, isolated DNA was digested by restriction enzyme, DNA was separated by agarose gel electrophosesis and DNA was blotted and blots were hybridized with suitable ³²P-labeled DNA probes for the hygromycin gene and SCP1 and soy KTi3 promoters in a Southern blot using common methods familiar to those skilled in the art.

[0438] In this way, it was determined that T0 plants from kept events AFS 8407-2-2 so and AFS 8377-1-2 contained perfect RMCE insertions into Target Line A and had no additional insertions of PHP50573 (donor) or PHP44664 (flp) DNA in the genome. It was also determined that events AFS 8377-5-3, AFS 8377-4-4 and AFS 8377-1-4 contained perfect RMCE insertions into Target Line A as well as a least one other insertion of donor or flp DNA in the genome. All events were carried to T1 seed.

### T1 Seed Oil Content and Fatty Acid Composition Analysis

[0439] Oil content of T1 seed from Soil19 events AFS 8407-2-2 (T1 seed from 4 T0 plants), AFS 8377-1-2 (T1 seed from 1 T0 plant), AFS 8377-5-3 (T1 seed from 1 T0 plant) and AFS 8377-1-4 (T1 seed from 2 T0 plants) was determined by NMR as described herein. A small seed chip was taken from each T1 seed from each event, hexane extracted and the fatty acid composition determined by GC-FAME as described herein. The remaining seed chip was extracted with methanol and soluble sugars separated and visualized by TLC as described in Example 2. T1 seed from plants from Soil19 event AFS 8377-4-4 were not analyzed for phenotypes but were instead planted directly. The results for oil content, fatty acid profile and sugar composition by TLC is shown in Table 3.

[0440] In Table 3, oil content is the weight percent oil of total seed weight and the fatty acid profile is the weight percent for individual fatty acids of total fatty acid. The total saturated fatty acids is indicated as Sats and is calculated by summing 16:0 and 18:0 (weight %). In Table 3, the amount of sucrose increase and stachyose decrease as indicated by the TLC plate is qualitatively scored on a scale of 0-3 where a 0 indicates wild-type levels of sugar and a 3 indicates substantially reduced stachyose and substantially increased sucrose. When left blank, the TLC score of a seed chip was not determined. In Table 3, results for each event are divided according to transgenic and null based on the TLC result and the alpha-linolenic content. Results are then sorted based on oil content. The average value for transgenic or null is indicated at the bottom of each column.

TABLE 3
Fatty acid composition, sugar readout and oil
content of T1 Seed from experiment Soil19.

| ¹T1 Seed | | | | | | | | |
|---|---|---|---|---|---|---|---|---|
| (AFS . . .) | TLC | % Oil | 16:0% | 18:0% | 18:1% | 18:2% | 18:3% | Sats |
| 8407-2-2-1-74 | | 29.5 | 9.2 | 5.0 | 30.9 | 53.6 | 1.2 | 14.2 |
| 8407-2-2-1-53 | | 28.4 | 9.2 | 4.4 | 30.6 | 54.1 | 1.8 | 13.6 |
| 8407-2-2-1-15 | 3 | 28.2 | 8.1 | 5.1 | 33.2 | 51.6 | 2.0 | 13.2 |
| 8407-2-2-1-23 | 3 | 27.4 | 9.3 | 4.2 | 29.0 | 55.0 | 2.5 | 13.5 |
| 8407-2-2-1-65 | | 27.4 | 8.8 | 4.8 | 29.3 | 55.0 | 2.0 | 13.6 |
| 8407-2-2-1-45 | 3 | 27.3 | 8.9 | 5.1 | 26.6 | 56.6 | 2.8 | 14.0 |
| 8407-2-2-1-80 | | 27.3 | 9.3 | 4.8 | 25.7 | 56.8 | 3.3 | 14.2 |
| 8407-2-2-1-43 | 3 | 27.3 | 9.1 | 5.6 | 30.9 | 52.6 | 1.9 | 14.6 |
| 8407-2-2-1-36 | 3 | 27.2 | 9.2 | 4.1 | 28.5 | 55.7 | 2.5 | 13.3 |
| 8407-2-2-1-34 | 3 | 27.1 | 8.9 | 5.2 | 28.5 | 54.0 | 3.4 | 14.1 |
| 8407-2-2-1-60 | | 26.8 | 9.3 | 5.3 | 28.5 | 54.8 | 2.0 | 14.7 |
| 8407-2-2-1-51 | | 26.8 | 10.6 | 3.6 | 25.6 | 57.4 | 2.8 | 14.2 |
| 8407-2-2-1-70 | | 26.8 | 9.3 | 4.7 | 26.4 | 56.7 | 2.9 | 14.0 |
| 8407-2-2-1-17 | 3 | 26.7 | 8.8 | 5.8 | 30.7 | 52.4 | 2.3 | 14.6 |
| 8407-2-2-1-63 | | 26.7 | 10.2 | 4.2 | 22.0 | 59.6 | 4.0 | 14.3 |
| 8407-2-2-1-77 | | 26.5 | 9.2 | 5.2 | 26.5 | 57.2 | 1.9 | 14.4 |
| 8407-2-2-1-79 | | 26.4 | 9.0 | 4.7 | 27.9 | 56.3 | 2.1 | 13.7 |
| 8407-2-2-1-31 | 3 | 26.3 | 9.3 | 4.8 | 27.0 | 55.5 | 3.4 | 14.1 |
| 8407-2-2-1-30 | 3 | 26.3 | 8.8 | 4.4 | 25.7 | 56.9 | 4.1 | 13.2 |
| 8407-2-2-1-29 | 3 | 26.3 | 8.5 | 5.5 | 29.8 | 53.8 | 2.4 | 14.1 |
| 8407-2-2-1-72 | | 26.3 | 9.3 | 4.4 | 26.8 | 56.4 | 3.1 | 13.7 |
| 8407-2-2-1-52 | | 26.2 | 9.6 | 4.5 | 24.6 | 58.0 | 3.3 | 14.1 |
| 8407-2-2-1-59 | | 26.1 | 9.5 | 5.0 | 26.0 | 55.9 | 3.6 | 14.5 |
| 8407-2-2-1-56 | | 25.9 | 9.4 | 4.2 | 24.5 | 58.2 | 3.6 | 13.6 |
| 8407-2-2-1-27 | 3 | 25.9 | 8.5 | 4.9 | 27.2 | 55.6 | 3.9 | 13.4 |
| 8407-2-2-1-49 | | 25.9 | 9.6 | 4.6 | 28.4 | 55.5 | 1.9 | 14.2 |
| 8407-2-2-1-57 | | 25.9 | 10.0 | 4.8 | 25.1 | 56.4 | 3.8 | 14.8 |
| 8407-2-2-1-37 | 3 | 25.9 | 9.2 | 4.9 | 26.8 | 55.3 | 3.7 | 14.2 |
| 8407-2-2-1-13 | 3 | 25.9 | 9.3 | 4.6 | 26.5 | 55.8 | 3.8 | 13.9 |
| 8407-2-2-1-21 | 3 | 25.8 | 9.6 | 5.3 | 24.3 | 57.8 | 3.0 | 14.9 |
| 8407-2-2-1-55 | | 25.7 | 9.6 | 4.6 | 25.9 | 56.1 | 3.7 | 14.2 |
| 8407-2-2-1-40 | 3 | 25.7 | 9.3 | 4.4 | 27.7 | 55.5 | 3.1 | 13.7 |
| 8407-2-2-1-8 | 3 | 25.7 | 9.6 | 4.9 | 30.1 | 53.5 | 1.9 | 14.5 |
| 8407-2-2-1-76 | | 25.6 | 9.1 | 4.9 | 30.0 | 54.6 | 1.5 | 13.9 |
| 8407-2-2-1-7 | 3 | 25.6 | 9.0 | 4.4 | 27.0 | 55.7 | 3.9 | 13.3 |
| 8407-2-2-1-5 | 3 | 25.5 | 7.8 | 4.3 | 34.7 | 51.6 | 1.7 | 12.1 |
| 8407-2-2-1-41 | 3 | 25.4 | 8.4 | 5.0 | 32.0 | 52.7 | 1.8 | 13.4 |
| 8407-2-2-1-12 | 3 | 25.4 | 8.6 | 5.1 | 31.8 | 52.3 | 2.1 | 13.8 |
| 8407-2-2-1-67 | | 25.3 | 9.8 | 4.3 | 24.4 | 57.7 | 3.8 | 14.1 |
| 8407-2-2-1-24 | 3 | 25.3 | 8.8 | 5.3 | 27.3 | 55.2 | 3.3 | 14.1 |
| 8407-2-2-1-38 | 3 | 25.2 | 9.8 | 4.5 | 26.2 | 55.8 | 3.7 | 14.3 |
| 8407-2-2-1-71 | | 25.2 | 8.4 | 4.9 | 30.5 | 53.7 | 2.5 | 13.4 |
| 8407-2-2-1-22 | 3 | 25.1 | 9.1 | 4.5 | 26.3 | 56.5 | 3.5 | 13.6 |
| 8407-2-2-1-25 | 3 | 24.9 | 8.8 | 4.5 | 27.6 | 55.9 | 3.2 | 13.3 |
| 8407-2-2-1-26 | 3 | 24.6 | 9.8 | 4.3 | 26.4 | 56.4 | 3.1 | 14.1 |
| 8407-2-2-1-35 | 3 | 24.5 | 8.9 | 4.9 | 28.0 | 54.6 | 3.5 | 13.8 |
| 8407-2-2-1-20 | 3 | 24.4 | 9.6 | 4.6 | 26.6 | 55.2 | 4.0 | 14.2 |
| 8407-2-2-1-46 | 3 | 24.3 | 9.0 | 4.9 | 27.0 | 55.1 | 4.1 | 13.9 |
| 8407-2-2-1-42 | 3 | 24.3 | 9.6 | 4.8 | 26.6 | 55.5 | 3.5 | 14.4 |
| 8407-2-2-1-78 | | 24.2 | 9.0 | 4.5 | 28.7 | 55.4 | 2.4 | 13.5 |
| 8407-2-2-1-3 | 3 | 24.1 | 8.9 | 4.0 | 29.2 | 55.0 | 2.8 | 12.9 |
| 8407-2-2-1-54 | | 23.8 | 10.1 | 3.7 | 26.8 | 55.9 | 3.5 | 13.8 |
| 8407-2-2-1-47 | 3 | 23.8 | 8.9 | 4.0 | 29.8 | 54.3 | 3.0 | 12.9 |
| 8407-2-2-1-6 | 3 | 23.7 | 9.2 | 4.3 | 28.2 | 55.0 | 3.3 | 13.5 |
| 8407-2-2-1-73 | | 23.6 | 10.0 | 4.1 | 27.2 | 55.9 | 2.8 | 14.1 |
| 8407-2-2-1-18 | 3 | 23.6 | 8.5 | 5.3 | 29.9 | 53.8 | 2.4 | 13.8 |
| 8407-2-2-1-10 | 3 | 23.5 | 9.8 | 4.8 | 26.2 | 56.0 | 3.3 | 14.6 |
| 8407-2-2-1-14 | 3 | 23.3 | 9.6 | 4.3 | 28.1 | 55.0 | 3.1 | 13.8 |
| Trans Avg. | | 25.8 | 9.2 | 4.7 | 27.8 | 55.4 | 2.9 | 13.9 |
| 8407-2-2-1-61 | | 24.5 | 11.1 | 4.4 | 16.3 | 57.7 | 10.6 | 15.5 |
| 8407-2-2-1-33 | 0 | 23.7 | 10.2 | 4.2 | 18.3 | 56.5 | 10.7 | 14.4 |
| 8407-2-2-1-44 | 0 | 23.7 | 11.0 | 4.0 | 18.6 | 54.4 | 12.1 | 15.0 |
| 8407-2-2-1-32 | 0 | 23.7 | 11.1 | 4.2 | 19.6 | 53.3 | 11.8 | 15.2 |
| 8407-2-2-1-69 | | 23.3 | 11.9 | 3.7 | 13.7 | 56.2 | 14.5 | 15.6 |
| 8407-2-2-1-11 | 0 | 23.3 | 10.8 | 3.9 | 17.2 | 54.7 | 13.5 | 14.7 |
| 8407-2-2-1-66 | | 23.2 | 11.3 | 3.7 | 15.9 | 57.9 | 11.2 | 15.0 |
| 8407-2-2-1-4 | 0 | 23.1 | 10.9 | 4.2 | 17.8 | 55.2 | 12.0 | 15.0 |
| 8407-2-2-1-50 | | 22.9 | 12.1 | 3.9 | 16.7 | 54.8 | 12.5 | 16.0 |
| 8407-2-2-1-16 | 0 | 22.9 | 11.5 | 3.9 | 17.1 | 54.0 | 13.6 | 15.4 |
| 8407-2-2-1-62 | | 22.9 | 11.6 | 4.1 | 17.1 | 54.0 | 13.2 | 15.7 |
| 8407-2-2-1-64 | | 22.8 | 12.6 | 3.3 | 13.1 | 53.1 | 17.9 | 15.8 |
| 8407-2-2-1-48 | 0 | 22.7 | 10.8 | 3.4 | 21.9 | 52.8 | 11.1 | 14.2 |
| 8407-2-2-1-19 | 0 | 22.6 | 11.1 | 4.3 | 16.3 | 54.5 | 13.8 | 15.4 |
| 8407-2-2-1-2 | 0 | 22.4 | 11.4 | 4.1 | 19.2 | 53.2 | 12.2 | 15.4 |
| 8407-2-2-1-39 | 0 | 21.8 | 10.9 | 3.4 | 18.3 | 55.3 | 12.2 | 14.2 |
| 8407-2-2-1-9 | 0 | 21.6 | 10.8 | 4.1 | 19.9 | 52.7 | 12.5 | 14.9 |
| 8407-2-2-1-58 | | 21.6 | 11.9 | 3.3 | 16.3 | 54.3 | 14.2 | 15.3 |
| 8407-2-2-1-68 | | 21.5 | 13.0 | 0.0 | 12.8 | 55.5 | 18.6 | 13.0 |
| 8407-2-2-1-1 | 0 | 21.0 | 11.1 | 3.5 | 19.8 | 53.2 | 12.4 | 14.5 |
| 8407-2-2-1-28 | 0 | 20.5 | 11.7 | 4.3 | 16.2 | 53.6 | 14.3 | 15.9 |
| 8407-2-2-1-75 | | 20.2 | 12.1 | 3.8 | 16.7 | 53.7 | 13.7 | 15.9 |
| Null Avg. | | 22.5 | 11.4 | 3.7 | 17.2 | 54.6 | 13.1 | 14.3 |
| 8407-2-2-2-20 | 3 | 26.8 | 9.2 | 4.2 | 33.5 | 51.1 | 1.9 | 13.4 |
| 8407-2-2-2-32 | 3 | 26.3 | 8.5 | 4.9 | 31.8 | 51.9 | 2.9 | 13.4 |
| 8407-2-2-2-14 | 3 | 26.1 | 8.6 | 4.2 | 31.9 | 52.4 | 2.9 | 12.8 |
| 8407-2-2-2-48 | 3 | 25.9 | 8.5 | 4.9 | 34.7 | 50.2 | 1.6 | 13.4 |
| 8407-2-2-2-21 | 3 | 25.8 | 8.7 | 5.2 | 31.4 | 52.3 | 2.3 | 13.9 |
| 8407-2-2-2-30 | 3 | 25.7 | 8.9 | 4.3 | 32.8 | 51.7 | 2.3 | 13.2 |
| 8407-2-2-2-35 | 3 | 25.4 | 8.7 | 4.1 | 33.6 | 50.8 | 2.9 | 12.7 |
| 8407-2-2-2-7 | 3 | 25.3 | 8.6 | 4.4 | 28.6 | 55.4 | 2.9 | 13.0 |
| 8407-2-2-2-39 | 3 | 25.2 | 8.9 | 4.9 | 26.4 | 56.1 | 3.7 | 13.8 |
| 8407-2-2-2-3 | 3 | 24.9 | 8.7 | 4.5 | 30.1 | 53.8 | 2.8 | 13.2 |
| 8407-2-2-2-47 | 3 | 24.9 | 8.2 | 5.0 | 38.7 | 46.7 | 1.4 | 13.2 |
| 8407-2-2-2-9 | 3 | 24.5 | 7.8 | 4.9 | 46.7 | 39.4 | 1.3 | 12.7 |
| 8407-2-2-2-40 | 3 | 24.5 | 9.5 | 4.3 | 28.4 | 54.8 | 3.0 | 13.8 |
| 8407-2-2-2-12 | 3 | 24.5 | 8.9 | 5.9 | 26.0 | 55.7 | 3.6 | 14.8 |
| 8407-2-2-2-18 | 3 | 24.5 | 8.6 | 5.3 | 29.8 | 54.2 | 2.1 | 13.9 |
| 8407-2-2-2-38 | 3 | 24.5 | 9.1 | 4.2 | 31.9 | 52.5 | 2.3 | 13.2 |
| 8407-2-2-2-25 | 3 | 24.0 | 8.6 | 4.6 | 30.3 | 53.3 | 3.1 | 13.2 |
| 8407-2-2-2-45 | 3 | 24.0 | 8.5 | 5.2 | 39.1 | 45.7 | 1.5 | 13.7 |
| 8407-2-2-2-41 | 3 | 23.9 | 8.0 | 4.5 | 40.0 | 46.1 | 1.4 | 12.5 |
| 8407-2-2-2-42 | 3 | 23.7 | 8.1 | 4.6 | 37.7 | 47.8 | 1.8 | 12.7 |
| 8407-2-2-2-27 | 3 | 23.5 | 9.2 | 4.8 | 36.3 | 48.2 | 1.6 | 14.0 |
| 8407-2-2-2-31 | 3 | 23.5 | 7.6 | 4.6 | 35.0 | 50.6 | 2.3 | 12.2 |
| 8407-2-2-2-23 | 3 | 23.4 | 8.7 | 4.2 | 35.7 | 48.9 | 2.5 | 12.9 |
| 8407-2-2-2-22 | 3 | 23.4 | 8.9 | 4.7 | 33.1 | 50.4 | 2.8 | 13.6 |
| 8407-2-2-2-43 | 3 | 23.3 | 8.0 | 4.4 | 37.2 | 48.9 | 1.5 | 12.5 |
| 8407-2-2-2-2 | 3 | 23.3 | 9.0 | 4.6 | 29.4 | 53.8 | 3.2 | 13.6 |
| 8407-2-2-2-19 | 3 | 23.2 | 8.7 | 3.7 | 38.0 | 47.6 | 2.0 | 12.4 |
| 8407-2-2-2-1 | 3 | 23.0 | 8.5 | 5.1 | 36.4 | 48.5 | 1.6 | 13.6 |
| 8407-2-2-2-11 | 3 | 22.9 | 8.8 | 4.2 | 34.8 | 50.5 | 1.7 | 13.0 |
| 8407-2-2-2-37 | 3 | 22.6 | 8.9 | 5.2 | 32.1 | 51.9 | 1.9 | 14.1 |
| 8407-2-2-2-10 | 3 | 22.1 | 7.9 | 4.0 | 39.9 | 46.1 | 2.1 | 11.8 |
| 8407-2-2-2-8 | 3 | 22.0 | 8.9 | 4.2 | 34.7 | 49.6 | 2.7 | 13.1 |
| 8407-2-2-2-36 | 3 | 21.8 | 8.5 | 5.6 | 33.8 | 48.9 | 3.1 | 14.2 |
| 8407-2-2-2-5 | 3 | 21.6 | 9.6 | 4.5 | 24.9 | 57.7 | 3.4 | 14.1 |
| 8407-2-2-2-34 | 3 | 17.0 | 8.5 | 4.5 | 53.0 | 31.9 | 2.1 | 13.0 |
| Trans Avg. | | 23.9 | 8.6 | 4.6 | 34.2 | 50.2 | 2.3 | 13.3 |
| 8407-2-2-2-29 | 0 | 22.8 | 10.3 | 3.5 | 24.0 | 51.8 | 10.4 | 13.8 |
| 8407-2-2-2-28 | 0 | 22.2 | 10.6 | 4.2 | 20.5 | 54.3 | 10.5 | 14.8 |
| 8407-2-2-2-16 | 0 | 18.9 | 10.8 | 3.2 | 25.2 | 50.2 | 10.6 | 13.9 |
| 8407-2-2-2-13 | 0 | 21.6 | 10.7 | 3.8 | 21.9 | 52.9 | 10.7 | 14.5 |
| 8407-2-2-2-24 | 0 | 20.4 | 11.3 | 3.4 | 23.6 | 50.5 | 11.1 | 14.7 |
| 8407-2-2-2-44 | 0 | 21.1 | 10.1 | 3.9 | 19.4 | 55.3 | 11.3 | 14.0 |
| 8407-2-2-2-33 | 0 | 15.1 | 10.7 | 2.4 | 28.6 | 46.5 | 11.7 | 13.1 |
| 8407-2-2-2-15 | 0 | 20.6 | 10.4 | 3.6 | 23.2 | 50.9 | 11.9 | 14.1 |
| 8407-2-2-2-26 | 0 | 19.5 | 11.1 | 3.6 | 22.4 | 50.7 | 12.2 | 14.7 |
| 8407-2-2-2-46 | 0 | 23.5 | 10.7 | 4.4 | 19.2 | 53.4 | 12.3 | 15.1 |
| 8407-2-2-2-4 | 0 | 21.0 | 10.7 | 3.3 | 21.7 | 51.8 | 12.5 | 14.0 |
| 8407-2-2-2-6 | 0 | 22.6 | 10.7 | 3.7 | 21.0 | 50.9 | 13.7 | 14.4 |
| 8407-2-2-2-17 | 0 | 21.1 | 10.9 | 3.7 | 15.9 | 55.1 | 14.3 | 14.6 |
| Null Avg. | | 20.8 | 10.7 | 3.6 | 22.1 | 51.9 | 11.8 | 14.3 |
| 8407-2-2-3-10 | 3 | 27.7 | 9.4 | 5.8 | 26.2 | 55.2 | 3.4 | 15.2 |
| 8407-2-2-3-26 | 3 | 26.7 | 8.8 | 4.5 | 30.5 | 52.9 | 3.4 | 13.3 |
| 8407-2-2-3-7 | 3 | 26.6 | 9.1 | 6.1 | 27.2 | 54.7 | 3.0 | 15.2 |
| 8407-2-2-3-8 | 3 | 24.9 | 8.1 | 4.5 | 31.4 | 53.9 | 2.2 | 12.5 |
| 8407-2-2-3-22 | 3 | 24.5 | 8.9 | 5.0 | 34.2 | 50.2 | 1.7 | 13.9 |
| 8407-2-2-3-47 | 3 | 23.8 | 8.8 | 4.6 | 29.7 | 54.2 | 2.7 | 13.4 |
| 8407-2-2-3-13 | 3 | 23.8 | 8.3 | 4.5 | 36.7 | 48.9 | 1.6 | 12.8 |
| 8407-2-2-3-2 | 3 | 23.7 | 8.7 | 4.1 | 30.3 | 53.3 | 3.6 | 12.8 |
| 8407-2-2-3-25 | 3 | 23.4 | 8.7 | 5.0 | 33.1 | 51.3 | 1.9 | 13.7 |
| 8407-2-2-3-43 | 3 | 23.3 | 8.0 | 4.8 | 34.3 | 50.8 | 2.1 | 12.8 |
| 8407-2-2-3-3 | 3 | 23.1 | 8.6 | 4.5 | 31.1 | 53.6 | 2.2 | 13.1 |
| 8407-2-2-3-18 | 3 | 23.0 | 9.4 | 4.8 | 26.4 | 55.6 | 3.8 | 14.2 |
| 8407-2-2-3-16 | 3 | 23.0 | 9.7 | 4.7 | 25.6 | 56.2 | 3.8 | 14.4 |
| 8407-2-2-3-1 | 3 | 22.9 | 9.3 | 4.6 | 28.1 | 55.3 | 2.8 | 13.8 |
| 8407-2-2-3-6 | 3 | 22.9 | 9.1 | 4.5 | 28.8 | 54.0 | 3.6 | 13.6 |
| 8407-2-2-3-40 | 3 | 22.8 | 8.7 | 4.9 | 32.8 | 51.9 | 1.7 | 13.6 |
| 8407-2-2-3-11 | 3 | 22.7 | 9.1 | 4.5 | 28.0 | 55.4 | 3.0 | 13.6 |
| 8407-2-2-3-23 | 3 | 22.6 | 8.0 | 5.0 | 34.2 | 51.1 | 1.7 | 13.0 |
| 8407-2-2-3-14 | 3 | 22.5 | 9.9 | 4.7 | 24.7 | 57.3 | 3.4 | 14.5 |
| 8407-2-2-3-36 | 3 | 22.3 | 10.1 | 4.8 | 21.5 | 58.8 | 4.8 | 14.9 |
| 8407-2-2-3-46 | 3 | 22.3 | 9.1 | 4.4 | 25.9 | 57.2 | 3.5 | 13.5 |
| 8407-2-2-3-30 | 3 | 22.2 | 8.2 | 5.6 | 33.3 | 50.8 | 2.1 | 13.8 |
| 8407-2-2-3-41 | 2 | 22.1 | 9.4 | 4.7 | 28.2 | 54.7 | 3.0 | 14.1 |
| 8407-2-2-3-42 | 2 | 22.0 | 9.0 | 4.1 | 29.2 | 54.6 | 3.1 | 13.1 |
| 8407-2-2-3-44 | 3 | 21.7 | 9.5 | 4.1 | 26.1 | 57.1 | 3.2 | 13.6 |
| 8407-2-2-3-34 | 3 | 21.6 | 9.2 | 4.6 | 26.6 | 56.6 | 3.0 | 13.8 |
| 8407-2-2-3-32 | 3 | 21.3 | 10.2 | 4.0 | 28.6 | 54.4 | 2.8 | 14.2 |
| 8407-2-2-3-35 | 3 | 21.1 | 9.1 | 4.2 | 27.2 | 56.6 | 2.9 | 13.3 |
| 8407-2-2-3-15 | 3 | 20.7 | 8.9 | 4.3 | 27.4 | 56.7 | 2.6 | 13.2 |
| 8407-2-2-3-29 | 3 | 20.7 | 8.6 | 5.0 | 29.0 | 53.7 | 3.6 | 13.6 |
| 8407-2-2-3-38 | 3 | 20.5 | 10.3 | 4.8 | 26.3 | 55.7 | 2.8 | 15.2 |
| Trans Avg. | | 23.0 | 9.0 | 4.7 | 29.1 | 54.3 | 2.9 | 13.7 |
| 8407-2-2-3-31 | 0 | 21.0 | 10.0 | 4.1 | 18.3 | 56.6 | 11.1 | 14.0 |
| 8407-2-2-3-37 | 0 | 20.9 | 9.8 | 3.6 | 16.6 | 55.6 | 14.3 | 13.4 |
| 8407-2-2-3-48 | 0 | 20.7 | 11.3 | 3.7 | 17.1 | 54.6 | 13.2 | 15.0 |
| 8407-2-2-3-39 | 0 | 20.7 | 11.7 | 3.6 | 20.7 | 52.3 | 11.8 | 15.3 |
| 8407-2-2-3-20 | 0 | 20.4 | 11.1 | 3.9 | 17.0 | 53.9 | 14.1 | 15.0 |
| 8407-2-2-3-28 | 0 | 20.4 | 10.6 | 4.0 | 15.3 | 55.3 | 14.8 | 14.6 |
| 8407-2-2-3-21 | 0 | 20.4 | 10.6 | 4.1 | 17.0 | 54.0 | 14.3 | 14.7 |
| 8407-2-2-3-33 | 0 | 20.2 | 10.7 | 3.4 | 18.4 | 55.1 | 12.4 | 14.1 |
| 8407-2-2-3-45 | 0 | 19.8 | 10.3 | 3.4 | 19.8 | 53.4 | 13.2 | 13.7 |
| 8407-2-2-3-5 | 0 | 19.5 | 11.1 | 3.4 | 17.1 | 54.1 | 14.3 | 14.5 |
| 8407-2-2-3-12 | 0 | 19.4 | 10.8 | 3.3 | 22.5 | 52.0 | 11.4 | 14.0 |
| 8407-2-2-3-27 | 0 | 19.3 | 9.9 | 3.7 | 17.4 | 57.2 | 11.9 | 13.5 |
| 8407-2-2-3-24 | 0 | 19.2 | 11.1 | 3.8 | 19.0 | 52.8 | 13.3 | 14.9 |
| 8407-2-2-3-19 | 0 | 19.0 | 11.4 | 3.4 | 23.3 | 51.5 | 10.4 | 14.8 |
| 8407-2-2-3-17 | 0 | 18.7 | 11.5 | 3.6 | 14.0 | 55.6 | 15.3 | 15.2 |
| 8407-2-2-3-9 | 0 | 18.1 | 10.5 | 3.4 | 13.2 | 54.7 | 18.2 | 13.9 |
| 8407-2-2-3-4 | 0 | 17.1 | 11.1 | 3.3 | 17.3 | 53.7 | 14.7 | 14.3 |
| Null Avg. | | 19.7 | 10.8 | 3.6 | 17.9 | 54.3 | 13.5 | 14.4 |
| 8407-2-2-4-24 | 3 | 27.9 | 8.5 | 5.8 | 31.9 | 51.6 | 2.2 | 14.3 |
| 8407-2-2-4-43 | 3 | 27.9 | 7.8 | 6.0 | 29.0 | 54.7 | 2.5 | 13.7 |
| 8407-2-2-4-15 | 3 | 27.1 | 7.9 | 5.4 | 33.4 | 51.0 | 2.3 | 13.3 |
| 8407-2-2-4-6 | 3 | 27.1 | 8.3 | 5.5 | 32.2 | 51.8 | 2.2 | 13.8 |
| 8407-2-2-4-1 | 3 | 27.0 | 9.2 | 5.2 | 27.2 | 55.6 | 2.9 | 14.4 |
| 8407-2-2-4-16 | 3 | 26.6 | 9.0 | 5.2 | 29.2 | 53.6 | 3.1 | 14.2 |
| 8407-2-2-4-48 | 3 | 26.4 | 8.1 | 5.2 | 32.1 | 52.4 | 2.1 | 13.4 |
| 8407-2-2-4-8 | 3 | 26.4 | 8.3 | 5.1 | 32.4 | 52.3 | 1.9 | 13.4 |
| 8407-2-2-4-10 | 3 | 26.3 | 8.9 | 4.8 | 28.8 | 54.6 | 3.0 | 13.6 |
| 8407-2-2-4-37 | 3 | 26.0 | 8.9 | 5.4 | 32.6 | 51.0 | 2.1 | 14.3 |
| 8407-2-2-4-34 | 3 | 26.0 | 9.0 | 4.5 | 29.7 | 53.9 | 3.0 | 13.4 |
| 8407-2-2-4-13 | 3 | 26.0 | 8.9 | 5.4 | 28.1 | 54.4 | 3.2 | 14.3 |
| 8407-2-2-4-20 | 3 | 25.9 | 9.0 | 5.6 | 26.1 | 56.3 | 3.1 | 14.5 |
| 8407-2-2-4-35 | 3 | 25.8 | 9.0 | 5.8 | 23.4 | 57.3 | 4.4 | 14.8 |
| 8407-2-2-4-38 | 3 | 25.8 | 8.8 | 4.7 | 30.3 | 52.3 | 3.8 | 13.5 |
| 8407-2-2-4-28 | 3 | 25.7 | 9.2 | 5.2 | 27.5 | 55.1 | 3.0 | 14.3 |
| 8407-2-2-4-31 | 3 | 25.7 | 9.1 | 5.7 | 27.0 | 54.7 | 3.5 | 14.8 |
| 8407-2-2-4-18 | 3 | 25.6 | 9.0 | 5.2 | 31.8 | 51.5 | 2.5 | 14.2 |
| 8407-2-2-4-17 | 3 | 25.6 | 9.0 | 5.0 | 27.6 | 55.3 | 3.1 | 14.0 |
| 8407-2-2-4-5 | 3 | 25.5 | 9.1 | 5.8 | 22.3 | 58.2 | 4.6 | 14.9 |
| 8407-2-2-4-19 | 3 | 25.4 | 0.0 | 0.0 | 36.9 | 63.1 | 0.0 | 0.0 |
| 8407-2-2-4-23 | 3 | 25.3 | 8.9 | 5.6 | 31.1 | 52.3 | 2.1 | 14.5 |
| 8407-2-2-4-7 | 3 | 25.2 | 8.5 | 5.7 | 30.8 | 52.8 | 2.3 | 14.2 |
| 8407-2-2-4-44 | 3 | 24.9 | 9.0 | 4.9 | 29.2 | 53.4 | 3.4 | 13.9 |
| 8407-2-2-4-46 | 3 | 24.8 | 9.5 | 4.8 | 26.9 | 54.8 | 4.0 | 14.3 |
| 8407-2-2-4-21 | 3 | 24.7 | 9.1 | 5.1 | 25.1 | 56.4 | 4.3 | 14.2 |
| 8407-2-2-4-4 | 3 | 24.7 | 9.0 | 4.3 | 32.4 | 52.4 | 1.8 | 13.3 |
| 8407-2-2-4-3 | 3 | 24.6 | 8.3 | 4.6 | 35.4 | 50.3 | 1.5 | 12.9 |
| 8407-2-2-4-47 | 3 | 24.5 | 9.1 | 4.3 | 29.0 | 54.2 | 3.3 | 13.5 |
| 8407-2-2-4-36 | 3 | 24.4 | 9.4 | 4.7 | 27.0 | 55.1 | 3.9 | 14.1 |
| 8407-2-2-4-27 | 3 | 24.2 | 9.1 | 5.1 | 24.5 | 56.0 | 5.3 | 14.2 |
| 8407-2-2-4-33 | 3 | 23.7 | 9.3 | 4.3 | 28.4 | 54.7 | 3.3 | 13.6 |
| 8407-2-2-4-40 | 3 | 23.5 | 9.5 | 4.5 | 26.2 | 55.7 | 4.1 | 14.0 |
| 8407-2-2-4-2 | 3 | 23.5 | 9.3 | 4.4 | 26.6 | 54.8 | 4.9 | 13.7 |
| 8407-2-2-4-30 | 3 | 22.3 | 8.3 | 6.1 | 32.6 | 50.6 | 2.5 | 14.4 |
| 8407-2-2-4-11 | 0 | 22.2 | 9.0 | 4.7 | 30.4 | 51.3 | 4.6 | 13.7 |
| Trans Avg. | | 25.4 | 8.6 | 5.0 | 29.3 | 54.0 | 3.1 | 13.6 |
| 8407-2-2-4-9 | 0 | 24.7 | 10.4 | 5.2 | 19.1 | 54.3 | 11.1 | 11.1 |
| 8407-2-2-4-39 | 0 | 24.5 | 10.8 | 4.1 | 16.5 | 55.3 | 13.3 | 14.8 |
| 8407-2-2-4-45 | 0 | 23.6 | 10.9 | 4.2 | 16.6 | 56.3 | 12.0 | 15.1 |
| 8407-2-2-4-12 | 0 | 23.0 | 10.8 | 4.1 | 17.4 | 53.8 | 13.9 | 14.8 |
| 8407-2-2-4-22 | 0 | 22.9 | 10.7 | 3.9 | 20.7 | 53.6 | 11.0 | 14.7 |
| 8407-2-2-4-14 | 0 | 22.9 | 11.0 | 3.7 | 18.9 | 53.0 | 13.3 | 14.8 |
| 8407-2-2-4-32 | 0 | 22.7 | 10.9 | 4.2 | 18.7 | 53.6 | 12.7 | 15.0 |
| 8407-2-2-4-25 | 0 | 22.7 | 10.9 | 4.4 | 18.2 | 53.7 | 12.8 | 15.3 |
| 8407-2-2-4-42 | 0 | 22.4 | 11.4 | 4.6 | 20.8 | 53.1 | 10.1 | 16.0 |
| 8407-2-2-4-29 | 0 | 21.7 | 11.6 | 4.7 | 17.8 | 53.2 | 12.7 | 16.3 |
| 8407-2-2-4-26 | 0 | 21.2 | 11.0 | 3.6 | 15.2 | 53.6 | 16.6 | 14.6 |
| 8407-2-2-4-41 | 0 | 20.9 | 11.8 | 3.7 | 17.6 | 54.7 | 12.3 | 15.4 |
| Null Avg. | | 22.8 | 11.0 | 4.2 | 18.1 | 54.0 | 12.6 | 14.8 |
| 8377-1-4-2-24 | 3 | 25.8 | 9.2 | 4.8 | 27.0 | 55.3 | 3.7 | 14.0 |
| 8377-1-4-2-42 | 3 | 25.7 | 9.4 | 5.3 | 26.7 | 56.4 | 2.2 | 14.7 |
| 8377-1-4-2-41 | 3 | 25.3 | 9.3 | 4.3 | 28.5 | 55.9 | 1.9 | 13.6 |
| 8377-1-4-2-2 | 3 | 25.2 | 8.5 | 4.3 | 33.0 | 51.9 | 2.2 | 12.8 |
| 8377-1-4-2-19 | 3 | 24.9 | 8.1 | 5.9 | 34.9 | 49.6 | 1.5 | 14.0 |
| 8377-1-4-2-21 | 3 | 24.9 | 8.9 | 5.1 | 27.4 | 56.5 | 2.1 | 14.0 |
| 8377-1-4-2-45 | 3 | 24.8 | 8.1 | 5.0 | 33.8 | 51.7 | 1.4 | 13.1 |
| 8377-1-4-2-3 | 3 | 24.8 | 7.9 | 5.6 | 35.1 | 50.0 | 1.4 | 13.5 |
| 8377-1-4-2-22 | 3 | 24.4 | 9.0 | 6.2 | 29.0 | 54.0 | 1.8 | 15.3 |
| 8377-1-4-2-1 | 3 | 24.3 | 8.6 | 4.3 | 28.3 | 54.5 | 4.3 | 12.9 |
| 8377-1-4-2-34 | 3 | 24.3 | 9.1 | 5.1 | 27.1 | 55.8 | 2.9 | 14.3 |
| 8377-1-4-2-14 | 3 | 24.3 | 8.7 | 4.8 | 27.6 | 55.9 | 3.0 | 13.5 |
| 8377-1-4-2-33 | 3 | 24.2 | 8.1 | 4.4 | 35.1 | 50.7 | 1.6 | 12.5 |
| 8377-1-4-2-39 | 3 | 24.0 | 9.1 | 3.4 | 29.5 | 56.2 | 1.9 | 12.5 |
| 8377-1-4-2-29 | 3 | 24.0 | 8.8 | 4.4 | 28.5 | 56.5 | 1.7 | 13.2 |
| 8377-1-4-2-38 | 3 | 23.9 | 8.9 | 5.8 | 28.3 | 55.1 | 1.9 | 14.7 |
| 8377-1-4-2-10 | 3 | 23.7 | 8.8 | 6.5 | 33.5 | 49.8 | 1.4 | 15.3 |
| 8377-1-4-2-11 | 3 | 23.7 | 8.3 | 4.9 | 35.9 | 49.3 | 1.6 | 13.2 |
| 8377-1-4-2-26 | 3 | 23.6 | 8.7 | 5.5 | 28.1 | 53.9 | 3.8 | 14.2 |
| 8377-1-4-2-16 | 3 | 23.6 | 8.9 | 4.4 | 29.9 | 55.1 | 1.8 | 13.2 |
| 8377-1-4-2-8 | 3 | 23.6 | 9.1 | 4.4 | 29.2 | 55.5 | 1.8 | 13.5 |
| 8377-1-4-2-13 | 3 | 23.5 | 8.9 | 4.2 | 32.6 | 51.5 | 2.8 | 13.1 |
| 8377-1-4-2-43 | 3 | 23.4 | 8.1 | 5.2 | 36.4 | 49.1 | 1.2 | 13.3 |
| 8377-1-4-2-27 | 3 | 23.2 | 9.3 | 4.5 | 27.7 | 56.6 | 1.9 | 13.8 |
| 8377-1-4-2-32 | 3 | 23.0 | 7.7 | 4.9 | 38.7 | 46.6 | 2.1 | 12.6 |
| 8377-1-4-2-44 | 3 | 22.9 | 9.2 | 5.3 | 28.9 | 54.5 | 2.1 | 14.5 |
| 8377-1-4-2-46 | 3 | 22.9 | 8.7 | 4.9 | 31.1 | 53.4 | 1.9 | 13.7 |
| 8377-1-4-2-40 | 3 | 22.9 | 9.1 | 4.8 | 31.4 | 52.8 | 1.8 | 13.9 |
| 8377-1-4-2-17 | 3 | 22.9 | 9.0 | 5.3 | 27.9 | 55.5 | 2.3 | 14.3 |
| 8377-1-4-2-18 | 3 | 22.7 | 9.0 | 5.3 | 30.5 | 53.2 | 1.9 | 14.3 |
| 8377-1-4-2-6 | 3 | 22.7 | 8.9 | 5.5 | 32.1 | 51.3 | 2.2 | 14.4 |
| 8377-1-4-2-30 | 3 | 22.2 | 8.9 | 4.5 | 29.5 | 53.6 | 3.5 | 13.4 |
| 8377-1-4-2-37 | 3 | 22.1 | 8.4 | 5.5 | 33.1 | 50.9 | 2.1 | 13.8 |
| 8377-1-4-2-7 | 3 | 22.1 | 8.5 | 4.2 | 31.2 | 53.8 | 2.2 | 12.8 |
| 8377-1-4-2-36 | 3 | 22.0 | 9.0 | 4.9 | 30.4 | 53.7 | 2.1 | 13.9 |
| 8377-1-4-2-20 | 3 | 21.9 | 10.7 | 4.0 | 20.7 | 60.6 | 4.0 | 14.7 |
| 8377-1-4-2-48 | 3 | 21.5 | 10.7 | 3.7 | 18.5 | 63.8 | 3.2 | 14.4 |
| 8377-1-4-2-15 | 3 | 21.5 | 10.2 | 4.0 | 18.5 | 64.4 | 2.9 | 14.2 |
| 8377-1-4-2-23 | 3 | 21.2 | 11.5 | 2.0 | 13.1 | 68.8 | 4.6 | 13.5 |
| 8377-1-4-2-4 | 3 | 21.1 | 10.6 | 4.1 | 16.3 | 64.6 | 4.4 | 14.7 |
| 8377-1-4-2-12 | 3 | 20.9 | 10.5 | 4.0 | 20.3 | 61.4 | 3.9 | 14.5 |
| 8377-1-4-2-47 | 3 | 20.7 | 10.7 | 4.0 | 17.6 | 64.7 | 3.1 | 14.7 |
| 8377-1-4-2-31 | 3 | 20.7 | 10.7 | 3.3 | 20.9 | 61.9 | 3.3 | 14.0 |
| 8377-1-4-2-25 | 3 | 20.6 | 9.7 | 3.7 | 19.8 | 63.4 | 3.4 | 13.5 |
| 8377-1-4-2-9 | 3 | 20.1 | 10.6 | 3.5 | 20.5 | 61.4 | 4.0 | 14.1 |
| 8377-1-4-2-35 | 3 | 19.7 | 10.1 | 5.0 | 24.7 | 58.5 | 1.7 | 15.0 |
| Trans Avg. | | 23.1 | 9.2 | 4.7 | 28.0 | 55.6 | 2.5 | 13.9 |
| 8377-1-4-2-5 | 0 | 21.7 | 10.2 | 3.8 | 16.2 | 55.4 | 14.4 | 14.0 |
| 8377-1-4-2-28 | 0 | 21.3 | 10.6 | 3.7 | 17.1 | 55.2 | 13.4 | 14.3 |
| Null Avg. | | 21.5 | 10.4 | 3.8 | 16.6 | 55.3 | 13.9 | 14.1 |
| 8377-1-4-3-32 | 3 | 24.9 | 8.1 | 7.4 | 36.1 | 46.7 | 1.6 | |
| 8377-1-4-3-23 | 3 | 24.6 | 7.9 | 8.8 | 35.3 | 46.7 | 1.2 | 16.7 |
| 8377-1-4-3-37 | 3 | 24.5 | 8.3 | 6.2 | 36.6 | 47.2 | 1.7 | 14.5 |
| 8377-1-4-3-48 | 3 | 23.8 | 8.9 | 5.2 | 27.4 | 54.2 | 4.4 | 14.1 |
| 8377-1-4-3-45 | 3 | 23.8 | 7.7 | 5.9 | 40.2 | 44.0 | 2.3 | 13.6 |
| 8377-1-4-3-30 | 3 | 23.3 | 8.7 | 5.3 | 27.7 | 54.2 | 4.1 | 14.1 |
| 8377-1-4-3-19 | 3 | 22.5 | 8.9 | 4.4 | 27.0 | 55.0 | 4.8 | 13.2 |
| 8377-1-4-3-18 | 3 | 22.3 | 8.3 | 7.3 | 38.1 | 44.9 | 1.5 | 15.5 |
| 8377-1-4-3-17 | 3 | 22.3 | 8.6 | 4.4 | 29.2 | 53.5 | 4.3 | 13.0 |
| 8377-1-4-3-2 | 3 | 22.1 | 8.2 | 5.3 | 37.0 | 47.3 | 2.2 | 13.5 |
| 8377-1-4-3-31 | 3 | 21.9 | 8.9 | 5.6 | 36.9 | 47.2 | 1.4 | 14.5 |
| 8377-1-4-3-12 | 3 | 21.7 | 8.5 | 4.4 | 33.8 | 48.7 | 4.6 | 12.9 |
| 8377-1-4-3-38 | 3 | 21.5 | 9.0 | 4.4 | 30.9 | 51.6 | 4.1 | 13.4 |
| 8377-1-4-3-4 | 3 | 21.4 | 9.4 | 5.6 | 25.1 | 53.8 | 6.2 | 15.0 |
| 8377-1-4-3-14 | 3 | 21.2 | 8.5 | 4.1 | 29.7 | 53.0 | 4.7 | 12.6 |
| 8377-1-4-3-11 | 3 | 21.1 | 8.1 | 5.9 | 40.1 | 44.4 | 1.5 | 14.0 |
| 8377-1-4-3-43 | 3 | 21.1 | 8.2 | 4.8 | 44.0 | 41.3 | 1.7 | 13.0 |
| 8377-1-4-3-22 | 3 | 21.1 | 8.7 | 4.0 | 33.5 | 50.0 | 3.7 | 12.7 |
| 8377-1-4-3-33 | 3 | 21.1 | 7.2 | 4.1 | 45.3 | 41.5 | 1.9 | 11.3 |
| 8377-1-4-3-6 | 3 | 21.0 | 8.8 | 4.0 | 32.9 | 49.6 | 4.7 | 12.8 |
| 8377-1-4-3-39 | 3 | 20.8 | 8.7 | 4.1 | 28.1 | 54.1 | 5.0 | 12.8 |
| 8377-1-4-3-25 | 3 | 20.7 | 8.0 | 4.1 | 32.7 | 51.0 | 4.3 | 12.1 |
| 8377-1-4-3-16 | 3 | 20.6 | 8.8 | 4.0 | 30.8 | 52.4 | 4.1 | 12.8 |
| 8377-1-4-3-9 | 3 | 20.4 | 7.7 | 5.1 | 43.5 | 42.1 | 1.6 | 12.8 |
| 8377-1-4-3-29 | 3 | 20.3 | 9.2 | 4.9 | 24.2 | 57.1 | 4.6 | 14.1 |
| 8377-1-4-3-40 | 3 | 20.2 | 7.5 | 4.9 | 41.9 | 43.8 | 2.0 | 12.4 |
| 8377-1-4-3-41 | 3 | 20.0 | 6.5 | 4.6 | 44.5 | 42.5 | 1.8 | 11.1 |
| 8377-1-4-3-36 | 3 | 19.9 | 8.7 | 5.4 | 29.4 | 52.9 | 3.6 | 14.1 |
| 8377-1-4-3-26 | 3 | 19.2 | 9.0 | 5.6 | 38.3 | 45.3 | 1.8 | 14.6 |
| 8377-1-4-3-20 | 3 | 19.0 | 8.2 | 4.7 | 38.4 | 46.1 | 2.6 | 12.9 |
| 8377-1-4-3-15 | 3 | 18.8 | 7.3 | 4.4 | 41.5 | 45.0 | 1.9 | 11.7 |
| 8377-1-4-3-28 | 3 | 18.7 | 7.0 | 5.4 | 46.9 | 39.1 | 1.5 | 12.5 |
| 8377-1-4-3-42 | 3 | 18.6 | 7.7 | 5.4 | 40.0 | 45.3 | 1.7 | 13.1 |
| 8377-1-4-3-8 | 3 | 18.5 | 7.1 | 3.6 | 46.2 | 41.2 | 1.9 | 10.7 |
| 8377-1-4-3-44 | 3 | 18.1 | 8.3 | 5.1 | 38.3 | 46.4 | 1.8 | 13.4 |
| 8377-1-4-3-24 | 3 | 17.9 | 7.8 | 4.2 | 38.9 | 47.1 | 2.0 | 12.0 |
| 8377-1-4-3-34 | 3 | 17.4 | 7.6 | 4.5 | 43.6 | 42.1 | 2.1 | 12.2 |
| 8377-1-4-3-3 | 3 | 17.0 | 7.9 | 5.5 | 38.4 | 46.0 | 2.1 | 13.4 |
| Trans Avg. | | 20.9 | 8.2 | 5.1 | 36.1 | 47.7 | 2.9 | 13.2 |
| 8377-1-4-3-21 | 0 | 20.6 | 9.8 | 4.1 | 18.6 | 54.7 | 12.8 | 13.9 |
| 8377-1-4-3-10 | 0 | 19.4 | 10.1 | 3.7 | 18.9 | 51.8 | 15.5 | 13.8 |
| 8377-1-4-3-47 | 0 | 19.1 | 9.8 | 3.5 | 19.7 | 54.1 | 13.0 | 13.3 |
| 8377-1-4-3-1 | 0 | 18.9 | 10.0 | 3.4 | 20.9 | 52.1 | 13.6 | 13.4 |
| 8377-1-4-3-7 | 0 | 18.8 | 9.0 | 3.3 | 18.6 | 54.7 | 14.3 | 12.3 |
| 8377-1-4-3-13 | 0 | 18.6 | 9.7 | 3.1 | 21.8 | 51.0 | 14.4 | 12.7 |
| 8377-1-4-3-5 | 0 | 18.4 | 9.8 | 3.6 | 17.9 | 53.8 | 14.9 | 13.3 |
| 8377-1-4-3-27 | 0 | 18.0 | 9.7 | 3.4 | 18.9 | 52.1 | 16.0 | 13.1 |
| 8377-1-4-3-46 | 0 | 17.5 | 10.1 | 3.2 | 19.4 | 50.8 | 16.5 | 13.3 |
| 8377-1-4-3-35 | 0 | 16.4 | 10.0 | 3.4 | 23.0 | 51.0 | 12.5 | 13.5 |
| Null Avg. | | 18.6 | 9.8 | 3.5 | 19.8 | 52.6 | 14.4 | 13.3 |
| 8377-5-3-3-16 | 3 | 22.4 | 9.0 | 3.6 | 31.8 | 52.3 | 3.4 | 12.6 |
| 8377-5-3-3-33 | 3 | 22.1 | 9.7 | 4.1 | 36.5 | 47.1 | 2.5 | 13.8 |
| 8377-5-3-3-30 | 3 | 21.9 | 9.3 | 4.3 | 31.0 | 53.3 | 2.2 | 13.6 |
| 8377-5-3-3-9 | 3 | 21.9 | 10.0 | 4.1 | 25.4 | 56.7 | 3.8 | 14.1 |
| 8377-5-3-3-37 | 3 | 21.7 | 8.6 | 4.1 | 41.3 | 42.9 | 3.1 | 12.7 |
| 8377-5-3-3-5 | 3 | 21.4 | 8.8 | 3.9 | 40.8 | 43.5 | 3.1 | 12.6 |
| 8377-5-3-3-10 | 3 | 21.4 | 10.8 | 3.9 | 24.3 | 56.6 | 4.4 | 14.7 |
| 8377-5-3-3-46 | 3 | 21.2 | 8.1 | 3.0 | 42.6 | 43.0 | 3.3 | 11.1 |
| 8377-5-3-3-39 | 3 | 21.1 | 10.4 | 4.0 | 33.0 | 48.5 | 4.1 | 14.5 |
| 8377-5-3-3-21 | 3 | 21.1 | 9.3 | 3.9 | 29.2 | 53.8 | 3.8 | 13.2 |
| 8377-5-3-3-36 | 3 | 21.0 | 9.2 | 3.7 | 45.2 | 39.8 | 2.2 | 12.9 |
| 8377-5-3-3-12 | 3 | 20.9 | 7.8 | 3.4 | 36.7 | 47.9 | 4.2 | 11.2 |
| 8377-5-3-3-19 | 3 | 20.9 | 9.0 | 3.8 | 49.7 | 34.3 | 3.2 | 12.8 |
| 8377-5-3-3-31 | 3 | 20.9 | 7.3 | 4.5 | 53.3 | 32.8 | 2.2 | 11.8 |
| 8377-5-3-3-26 | 3 | 20.9 | 7.6 | 3.6 | 34.9 | 50.8 | 3.1 | 11.2 |
| 8377-5-3-3-43 | 3 | 20.8 | 8.1 | 4.0 | 41.3 | 44.5 | 2.0 | 12.1 |
| 8377-5-3-3-41 | 3 | 20.6 | 10.0 | 3.6 | 49.4 | 34.0 | 2.9 | 13.6 |
| 8377-5-3-3-28 | 3 | 20.5 | 8.7 | 4.0 | 43.9 | 40.0 | 3.4 | 12.8 |
| 8377-5-3-3-22 | 3 | 20.4 | 8.5 | 3.1 | 39.9 | 44.9 | 3.7 | 11.5 |
| 8377-5-3-3-25 | 3 | 20.3 | 8.7 | 4.6 | 54.8 | 29.9 | 2.0 | 13.3 |
| 8377-5-3-3-47 | 3 | 20.2 | 8.9 | 3.6 | 44.8 | 39.8 | 2.8 | 12.5 |
| 8377-5-3-3-38 | 3 | 20.2 | 8.1 | 4.0 | 49.8 | 36.8 | 1.2 | 12.1 |
| 8377-5-3-3-7 | 3 | 20.1 | 9.5 | 4.3 | 40.3 | 42.5 | 3.4 | 13.8 |
| 8377-5-3-3-14 | 3 | 20.0 | 10.3 | 4.0 | 51.1 | 30.5 | 4.1 | 14.4 |
| 8377-5-3-3-1 | ? | 20.0 | 8.6 | 4.1 | 33.7 | 49.0 | 4.6 | 12.7 |
| 8377-5-3-3-3 | 3 | 19.8 | 7.6 | 3.1 | 46.5 | 39.0 | 3.9 | 10.7 |
| 8377-5-3-3-17 | 3 | 19.8 | 7.5 | 3.9 | 46.8 | 38.1 | 3.6 | 11.4 |
| 8377-5-3-3-29 | 3 | 19.6 | 8.1 | 4.1 | 36.8 | 47.8 | 3.2 | 12.2 |
| 8377-5-3-3-15 | 3 | 19.6 | 8.2 | 3.5 | 34.6 | 50.8 | 2.9 | 11.8 |
| 8377-5-3-3-18 | 3 | 19.6 | 8.2 | 2.3 | 53.8 | 33.7 | 2.0 | 10.5 |
| 8377-5-3-3-6 | 3 | 19.6 | 8.0 | 3.6 | 39.3 | 44.9 | 4.2 | 11.6 |
| 8377-5-3-3-20 | 3 | 19.5 | 8.8 | 3.8 | 44.8 | 39.3 | 3.4 | 12.6 |
| 8377-5-3-3-48 | 3 | 19.2 | 9.2 | 3.0 | 55.3 | 29.9 | 2.7 | 12.1 |
| 8377-5-3-3-2 | 3 | 19.1 | 7.6 | 3.8 | 50.7 | 35.6 | 2.3 | 11.4 |
| 8377-5-3-3-44 | 3 | 19.0 | 9.3 | 3.7 | 44.1 | 39.2 | 3.7 | 13.0 |
| 8377-5-3-3-34 | 3 | 18.9 | 11.1 | 3.9 | 39.3 | 43.1 | 2.5 | 15.1 |
| 8377-5-3-3-24 | 3 | 18.1 | 8.9 | 3.4 | 42.7 | 41.9 | 3.2 | 12.3 |
| Trans Avg. | | 20.4 | 8.8 | 3.8 | 41.6 | 42.7 | 3.1 | 12.6 |
| 8377-5-3-3-45 | 0 | 20.1 | 10.6 | 3.4 | 33.8 | 43.0 | 9.3 | 13.9 |
| 8377-5-3-3-4 | 0 | 19.3 | 9.5 | 3.0 | 22.3 | 52.3 | 12.9 | 12.6 |
| 8377-5-3-3-27 | 0 | 18.6 | 10.9 | 3.4 | 24.5 | 48.1 | 13.1 | 14.3 |
| 8377-5-3-3-23 | 0 | 18.4 | 10.7 | 3.4 | 32.5 | 42.9 | 10.6 | 14.1 |
| 8377-5-3-3-40 | 0 | 18.4 | 9.5 | 2.7 | 45.8 | 33.8 | 8.1 | 12.3 |
| 8377-5-3-3-8 | 0 | 18.4 | 10.3 | 3.0 | 23.1 | 49.3 | 14.3 | 13.3 |
| 8377-5-3-3-32 | 0 | 18.1 | 10.7 | 3.0 | 16.4 | 55.8 | 14.1 | 13.7 |
| 8377-5-3-3-11 | 0 | 18.1 | 10.1 | 2.4 | 28.6 | 45.3 | 13.7 | 12.4 |
| 8377-5-3-3-42 | 0 | 18.1 | 13.5 | 3.9 | 38.6 | 35.4 | 8.5 | 17.5 |
| 8377-5-3-3-35 | 0 | 17.8 | 11.4 | 3.9 | 26.7 | 47.2 | 10.9 | 15.2 |
| 8377-5-3-3-13 | 0 | 17.0 | 10.7 | 2.6 | 26.8 | 48.6 | 11.2 | 13.4 |
| Null Avg. | | 18.4 | 10.7 | 3.1 | 29.0 | 45.6 | 11.5 | 13.9 |
| 8377-5-3-4-23 | 3 | 23.6 | 10.5 | 3.8 | 30.1 | 52.5 | 3.1 | 14.4 |
| 8377-5-3-4-27 | 3 | 22.5 | 9.0 | 4.2 | 36.2 | 48.3 | 2.4 | 13.2 |
| 8377-5-3-4-11 | 3 | 22.5 | 8.9 | 4.0 | 37.8 | 47.5 | 1.7 | 13.0 |
| 8377-5-3-4-30 | 3 | 22.4 | 7.4 | 4.6 | 50.2 | 36.0 | 1.7 | 12.1 |
| 8377-5-3-4-18 | 3 | 22.1 | 9.0 | 5.2 | 32.9 | 50.5 | 2.3 | 14.2 |
| 8377-5-3-4-9 | 3 | 21.9 | 8.8 | 3.1 | 42.1 | 42.9 | 3.1 | 11.9 |
| 8377-5-3-4-7 | 3 | 21.7 | 8.9 | 3.2 | 32.3 | 52.5 | 3.1 | 12.1 |
| 8377-5-3-4-4 | 3 | 21.7 | 9.2 | 3.6 | 44.8 | 40.5 | 1.9 | 12.8 |
| 8377-5-3-4-19 | 3 | 21.5 | 9.5 | 4.8 | 36.6 | 46.1 | 2.9 | 14.3 |
| 8377-5-3-4-16 | 3 | 21.4 | 7.3 | 4.2 | 49.3 | 36.7 | 2.5 | 11.5 |
| 8377-5-3-4-25 | 3 | 21.0 | 9.2 | 3.7 | 38.5 | 46.1 | 2.6 | 12.9 |
| 8377-5-3-4-6 | 3 | 20.8 | 8.6 | 3.9 | 34.9 | 49.4 | 3.2 | 12.5 |
| 8377-5-3-4-26 | 3 | 20.8 | 9.9 | 4.3 | 28.7 | 53.4 | 3.7 | 14.2 |
| 8377-5-3-4-20 | 3 | 20.7 | 9.0 | 6.1 | 29.9 | 51.6 | 3.3 | 15.1 |
| 8377-5-3-4-22 | 3 | 20.4 | 8.8 | 4.2 | 44.9 | 40.3 | 1.7 | 13.0 |
| 8377-5-3-4-13 | 3 | 20.3 | 9.2 | 3.8 | 44.7 | 40.0 | 2.3 | 13.0 |
| 8377-5-3-4-2 | 3 | 20.2 | 8.2 | 3.4 | 42.2 | 43.3 | 2.8 | 11.6 |
| 8377-5-3-4-29 | 3 | 20.1 | 8.4 | 4.7 | 51.7 | 33.4 | 1.8 | 13.1 |
| 8377-5-3-4-33 | 3 | 19.7 | 7.9 | 4.5 | 33.2 | 52.3 | 2.1 | 12.4 |
| 8377-5-3-4-10 | 3 | 19.7 | 11.3 | 4.4 | 34.3 | 47.7 | 2.4 | 15.7 |
| 8377-5-3-4-15 | 3 | 19.4 | 8.1 | 3.9 | 50.6 | 35.6 | 1.8 | 11.9 |
| 8377-5-3-4-5 | 3 | 19.2 | 8.4 | 3.0 | 54.7 | 31.5 | 2.3 | 11.4 |
| 8377-5-3-4-12 | 3 | 19.0 | 7.7 | 4.6 | 45.8 | 40.3 | 1.6 | 12.3 |
| 8377-5-3-4-8 | 3 | 18.9 | 11.1 | 4.0 | 34.4 | 47.7 | 2.8 | 15.1 |
| 8377-5-3-4-28 | 3 | 18.9 | 9.1 | 4.4 | 49.7 | 34.9 | 1.9 | 13.4 |
| 8377-5-3-4-3 | 3 | 18.5 | 8.6 | 3.4 | 58.3 | 28.4 | 1.2 | 12.1 |
| 8377-5-3-4-17 | 3 | 17.4 | 9.1 | 4.0 | 24.2 | 58.2 | 4.5 | 13.1 |
| 8377-5-3-4-24 | 3 | 16.1 | 7.3 | 4.3 | 49.1 | 38.1 | 1.2 | 11.6 |
| Trans Avg. | | 20.4 | 8.9 | 4.1 | 40.8 | 43.8 | 2.4 | 13.0 |
| 8377-5-3-4-21 | 0 | 19.5 | 9.9 | 3.2 | 38.4 | 40.2 | 8.4 | 13.0 |
| 8377-5-3-4-1 | 0 | 19.1 | 11.2 | 3.6 | 20.7 | 51.4 | 13.1 | 14.8 |
| 8377-5-3-4-14 | 0 | 18.9 | 9.0 | 3.2 | 43.1 | 35.6 | 9.1 | 12.2 |
| 8377-5-3-4-32 | 0 | 15.9 | 13.0 | 4.7 | 39.1 | 33.4 | 9.8 | 17.7 |
| 8377-5-3-4-31 | 0 | 15.3 | 10.7 | 3.7 | 24.2 | 50.6 | 10.8 | 14.4 |
| Null Avg. | | 17.7 | 10.7 | 3.7 | 33.1 | 42.2 | 10.3 | 14.4 |
| 8377-1-2-1-26 | 3 | 25.0 | 8.3 | 6.4 | 30.6 | 52.7 | 2.0 | 14.7 |
| 8377-1-2-1-11 | 3 | 24.8 | 8.0 | 5.5 | 34.2 | 49.8 | 2.4 | 13.5 |
| 8377-1-2-1-32 | 3 | 24.8 | 8.4 | 6.9 | 30.4 | 52.3 | 2.0 | 15.2 |
| 8377-1-2-1-18 | 3 | 24.7 | 8.4 | 4.9 | 31.2 | 52.6 | 2.9 | 13.3 |
| 8377-1-2-1-33 | 3 | 24.5 | 8.5 | 5.8 | 28.9 | 53.8 | 3.0 | 14.3 |
| 8377-1-2-1-30 | 3 | 24.3 | 7.8 | 7.1 | 30.4 | 52.7 | 2.0 | 14.9 |
| 8377-1-2-1-8 | 3 | 24.1 | 9.0 | 4.9 | 28.7 | 54.3 | 3.1 | 13.9 |
| 8377-1-2-1-35 | 3 | 24.1 | 9.6 | 5.1 | 26.7 | 55.1 | 3.6 | 14.7 |
| 8377-1-2-1-4 | 3 | 23.6 | 8.3 | 7.3 | 30.6 | 51.6 | 2.2 | 15.6 |
| 8377-1-2-1-36 | 3 | 23.5 | 7.5 | 6.4 | 32.2 | 52.3 | 1.6 | 13.9 |
| 8377-1-2-1-7 | 3 | 23.3 | 8.0 | 6.1 | 29.9 | 54.1 | 1.9 | 14.1 |
| 8377-1-2-1-21 | 3 | 22.9 | 8.9 | 6.0 | 24.4 | 57.1 | 3.6 | 14.9 |
| 8377-1-2-1-5 | 3 | 22.8 | 9.9 | 6.1 | 29.8 | 52.1 | 2.1 | 16.0 |
| 8377-1-2-1-25 | 3 | 22.7 | 9.0 | 5.1 | 29.8 | 52.9 | 3.2 | 14.1 |
| 8377-1-2-1-10 | 3 | 22.6 | 9.2 | 6.2 | 26.0 | 55.2 | 3.3 | 15.5 |
| 8377-1-2-1-19 | 3 | 22.4 | 9.6 | 4.8 | 25.6 | 55.8 | 4.3 | 14.4 |
| 8377-1-2-1-28 | 3 | 22.2 | 9.1 | 4.7 | 31.3 | 51.3 | 3.6 | 13.8 |
| 8377-1-2-1-29 | 3 | 21.9 | 8.2 | 4.8 | 32.9 | 51.8 | 2.3 | 12.9 |
| 8377-1-2-1-22 | 3 | 21.9 | 10.1 | 5.5 | 23.5 | 57.7 | 3.1 | 15.6 |
| 8377-1-2-1-1 | 3 | 21.7 | 9.8 | 5.3 | 25.6 | 55.8 | 3.4 | 15.1 |
| 8377-1-2-1-9 | 3 | 21.6 | 9.8 | 5.2 | 24.6 | 55.9 | 4.6 | 15.0 |
| 8377-1-2-1-31 | 3 | 21.4 | 8.8 | 4.4 | 32.4 | 51.8 | 2.6 | 13.2 |
| 8377-1-2-1-6 | 3 | 20.9 | 9.2 | 5.8 | 23.5 | 57.2 | 4.2 | 15.0 |
| 8377-1-2-1-15 | 3 | 20.7 | 9.5 | 4.4 | 31.8 | 51.8 | 2.6 | 13.9 |
| 8377-1-2-1-14 | 3 | 20.6 | 9.0 | 5.0 | 28.7 | 54.0 | 3.3 | 14.0 |
| 8377-1-2-1-16 | 3 | 20.3 | 9.1 | 4.9 | 32.1 | 50.9 | 3.1 | 14.0 |
| 8377-1-2-1-17 | 3 | 20.2 | 9.1 | 5.6 | 28.6 | 53.4 | 3.3 | 14.7 |
| 8377-1-2-1-20 | 3 | 18.8 | 9.2 | 6.1 | 22.9 | 57.2 | 4.4 | 15.4 |
| 8377-1-2-1-23 | 3 | 17.8 | 9.8 | 6.1 | 23.8 | 56.4 | 3.9 | 15.9 |
| Trans Avg. | | 22.4 | 8.9 | 5.6 | 28.7 | 53.8 | 3.0 | 14.5 |
| 8377-1-2-1-24 | 0 | 19.8 | 11.0 | 4.4 | 16.7 | 53.9 | 14.1 | 15.4 |
| 8377-1-2-1-34 | 0 | 19.8 | 11.1 | 5.0 | 17.3 | 53.6 | 13.0 | 16.1 |
| 8377-1-2-1-3 | 0 | 19.1 | 10.0 | 3.9 | 21.9 | 52.2 | 12.0 | 13.9 |
| 8377-1-2-1-2 | 0 | 18.4 | 11.1 | 4.3 | 16.9 | 53.9 | 13.9 | 15.3 |
| 8377-1-2-1-13 | 0 | 18.3 | 11.3 | 3.9 | 14.5 | 54.8 | 15.4 | 15.2 |
| 8377-1-2-1-12 | 0 | 17.3 | 10.9 | 3.8 | 14.1 | 51.9 | 19.2 | 14.7 |
| 8377-1-2-1-27 | 0 | 17.1 | 12.3 | 4.5 | 15.7 | 52.1 | 15.4 | 16.8 |
| Null Avg. | | 18.5 | 11.1 | 4.3 | 16.7 | 53.2 | 14.7 | 15.4 |

¹T1 seed description, e.g. AFS 8407-2-2-1-74: AFS8407-2-2 (=event), AFS8407-2-2-1 (=plant 1 of event AFS8407-2-2-1, AFS8407-2-2-1-74 (=T1 seed 74 from plant 1 of event AFS8407-2-2-1).

[0441] From Table 3, it can be seen that transgenic seed have higher oil and oleic acid content than null seed and also have lower alpha-linolenic content compared to null seed. Also, transgenic seed show decreased raffinosaccharides and increased sucrose by TLC compared to null seed.

[0442] Additionally, it can be seen that all events segregate for phenotype (TLC result and lower alpha-linolenic acid) in a 3:1 Mendelian fashion except for event AFS 8377-1-4. Southern blot data indicated that this event has an extra copy of donor DNA which in this case is giving rise to a phenotype in all transgenic seed and is thus, the extra copy is functional. This extra copy can be segregated away in later generations in event AFS 8377-1-4. Southern blot analysis of T0 tissue of AFS 3877-4-4 and AFS 8377-5-3 tissue had also indicated and extra copy of DNA but in those cases, the extra copy did not give rise to a phenotype and could also be segregated way.

[0443] A summary of the average values for oil content and fatty acid profile for T1 seed from each event, along with the difference in oil content for each event is shown in Table 4. In Table 4, the percent change of transgenic compared to null is indicated as % Change.

TABLE 4
Average oil contents and fatty acid profiles for T1 seed from RMCE events
from Soil19.

| T0 | | | | | | | | |
|---|---|---|---|---|---|---|---|---|
| Plant | T1 Seed | % Oil | 16:0% | 18:0% | 18:1% | 18:2% | 18:3% | Sats |
| AFS | Null Avg. | 18.5 | 11.1 | 4.3 | 16.7 | 53.2 | 14.7 | 15.4 |
| 8377.1.2.1 | | | | | | | | |
| AFS | Trans Avg. | 22.4 | 8.9 | 5.6 | 28.7 | 53.8 | 3.0 | 14.5 |
| 8377.1.2.1 | | | | | | | | |
| | % Change | 21 | −19 | 32 | 71 | 1 | −79 | −5 |
| AFS | Null Avg. | 21.5 | 10.4 | 3.8 | 16.6 | 55.3 | 13.9 | 14.1 |
| 8377.1.4.2 | | | | | | | | |
| AFS | Trans Avg. | 23.1 | 9.2 | 4.7 | 28.0 | 55.6 | 2.5 | 13.9 |
| 8377.1.4.2 | | | | | | | | |
| | % Change | 7 | −11 | 24 | 68 | 1 | −82 | −2 |
| AFS | Null Avg. | 18.6 | 9.8 | 3.5 | 19.8 | 52.6 | 14.4 | 13.3 |
| 8377.1.4.3 | | | | | | | | |
| AFS | Trans Avg. | 20.9 | 8.2 | 5.1 | 36.1 | 47.7 | 2.9 | 13.3 |
| 8377.1.4.3 | | | | | | | | |
| | % Change | 12 | −16 | 46 | 83 | −9 | −80 | 0 |
| AFS | Null Avg. | 18.4 | 10.7 | 3.1 | 29.0 | 45.6 | 11.5 | 13.9 |
| 8377.5.3.3 | | | | | | | | |
| AFS | Trans Avg. | 20.4 | 8.8 | 3.8 | 41.6 | 42.7 | 3.1 | 12.6 |
| 8377.5.3.3 | | | | | | | | |
| | % Change | 11 | −18 | 19 | 43 | −6 | −73 | −9 |
| AFS | Null Avg. | 17.7 | 10.7 | 3.7 | 33.1 | 42.2 | 10.3 | 14.4 |
| 8377.5.3.4 | | | | | | | | |
| AFS | Trans Avg. | 20.4 | 8.9 | 4.1 | 40.8 | 43.8 | 2.4 | 13.0 |
| 8377.5.3.4 | | | | | | | | |
| | % Change | 15 | −17 | 12 | 23 | 4 | −76 | −10 |
| AFS | Null Avg. | 22.5 | 11.4 | 3.7 | 17.2 | 54.6 | 13.1 | 15.1 |
| 8407.2.2.1 | | | | | | | | |
| AFS | Trans Avg. | 25.8 | 9.2 | 4.7 | 27.8 | 55.4 | 2.9 | 13.9 |
| 8407.2.2.1 | | | | | | | | |
| | % Change | 14 | −19 | 27 | 62 | 1 | −78 | −8 |
| AFS | Null Avg. | 20.8 | 10.7 | 3.6 | 22.1 | 51.9 | 11.8 | 14.3 |
| 8407.2.2.2 | | | | | | | | |
| AFS | Trans Avg. | 23.9 | 8.6 | 4.6 | 34.2 | 50.2 | 2.3 | 13.3 |
| 8407.2.2.2 | | | | | | | | |
| | % Change | 15 | −19 | 29 | 55 | −3 | −80 | −7 |
| AFS | Null Avg. | 19.7 | 10.8 | 3.6 | 17.9 | 54.3 | 13.5 | 14.4 |
| 8407.2.2.3 | | | | | | | | |
| AFS | Trans Avg. | 23.0 | 9.0 | 4.7 | 29.1 | 54.3 | 2.9 | 13.7 |
| 8407.2.2.3 | | | | | | | | |
| | % Change | 17 | −16 | 30 | 63 | 0 | −79 | −5 |
| AFS | Null Avg. | 22.8 | 11.0 | 4.2 | 18.1 | 54.0 | 12.6 | 15.2 |
| 8407.2.2.4 | | | | | | | | |
| AFS | Trans Avg. | 25.4 | 8.6 | 5.0 | 29.3 | 54.0 | 3.1 | 13.6 |
| 8407.2.2.4 | | | | | | | | |
| | % Change | 12 | −22 | 19 | 62 | 0 | −76 | −11 |

[0444] In Table 4, average oil content percent increases comparing all transgenic seed to null segregant T1 seed range from 7 to 21% over null. Palmitic acid average percent decrease ranges from 11 to 19%. Stearic acid average percent increase ranges from 12 to 46%. Total Sats decrease ranges from 0 to 11%. Oleic acid average percent increase ranges from 23 to 83%. Linoleic acid increases or decreases slightly (−9% to 1% change). Alpha-linolenic acid average percent decrease ranges from 73 to 82%.

### Example 5

### Compositional Analysis of Soybean Seed

[0445] The present example describes measurements of seed compositional parameters such as protein content and content of soluble carbohydrates of soybean seed derived from transgenic events. To this end the concentrations of protein, soluble carbohydrates and starch were measured as follows.

### Non-Structural Carbohydrate and Protein Analysis.

[0446] Dry soybean seed were ground to a fine powder in a GenoGrinder and subsamples were weighed (to an accuracy of 0.1 mg) into 13×100 mm glass tubes; the tubes had Teflon® lined screw-cap closures. Three replicates were prepared for each sample tested. Tissue dry weights were calculated by weighing sub-samples before and after drying in a forced air oven for 18 h at 105 C.

[0447] Lipid extraction was performed by adding 2 ml aliquots of heptane to each tube. The tubes were vortex mixed and placed into an ultrasonic bath (VWR Scientific Model 750D) filled with water heated to 60 C. The samples were sonicated at full-power (˜360 W) for 15 min and were then centrifuged (5 min×1700 g). The supernatants were transferred to clean 13×100 mm glass tubes and the pellets were extracted 2 more times with heptane (2 ml, second extraction, 1 ml third extraction) with the supernatants from each extraction being pooled. After lipid extraction 1 ml acetone was added to the pellets and after vortex mixing, to fully disperse the material, they were taken to dryness in a Speedvac.

### Non-Structural Carbohydrate Extraction and Analysis.

[0448] Two ml of 80% ethanol was added to the dried pellets from above. The samples were thoroughly vortex mixed until the plant material was fully dispersed in the solvent prior to sonication at 60 C for 15 min. After centrifugation, 5 min×1700 g, the supernatants were decanted into clean 13×100 mm glass tubes. Two more extractions with 80% ethanol were performed and the supernatants from each were pooled. The extracted pellets were suspended in acetone and dried (as above). An internal standard β-phenyl glucopyranoside (100 ul of a 0.5000+/−0.0010 g/100 ml stock) was added to each extract prior to drying in a Speedvac. The extracts were maintained in a desiccator until further analysis.

[0449] The acetone dried powders from above were suspended in 0.9 ml MOPS (3-N[Morpholino]propane-sulfonic acid; 50 mM, 5 mM CaCl₂, pH 7.0) buffer containing 1000 of heat stable α-amylase (from Bacillus licheniformis; Sigma A-4551). Samples were placed in a heat block (90 C) for 75 min and were vortex mixed every 15 min. Samples were then allowed to cool to room temperature and 0.6 ml acetate buffer (285 mM, pH 4.5) containing 5 U amyloglucosidase (Roche 110 202 367 001) was added to each. Samples were incubated for 15-18 h at 55 C in a water bath fitted with a reciprocating shaker; standards of soluble potato starch (Sigma S-2630) were included to ensure that starch digestion went to completion.

[0450] Post-digestion the released carbohydrates were extracted prior to analysis. Absolute ethanol (6 ml) was added to each tube and after vortex mixing the samples were sonicated for 15 min at 60 C. Samples were centrifuged (5 min×1700 g) and the supernatants were decanted into clean 13×100 mm glass tubes. The pellets were extracted 2 more times with 3 ml of 80% ethanol and the resulting supernatants were pooled. Internal standard (100 ul [symbol] L-phenyl glucopyranoside, as above) was added to each sample prior to drying in a Speedvac.

### Sample Preparation and Analysis

[0451] The dried samples from the soluble and starch extractions described above were solubilized in anhydrous pyridine (Sigma-Aldrich P57506) containing 30 mg/ml of hydroxylamine HCl (Sigma-Aldrich 159417). Samples were placed on an orbital shaker (300 rpm) overnight and were then heated for 1 hr (75 C) with vigorous vortex mixing applied every 15 min. After cooling to room temperature 1 ml hexamethyldisilazane (Sigma-Aldrich H-4875) and 100 ul trifluoroacetic acid (Sigma-Aldrich T-6508) were added. The samples were vortex mixed and the precipitates were allowed to settle prior to transferring the supernatants to GC sample vials.

[0452] Samples were analyzed on an Agilent 6890 gas chromatograph fitted with a DB-17MS capillary column (15 m×0.32 mm×0.25 um film). Inlet and detector temperatures were both 275 C. After injection (2 ul, 20:1 split) the initial column temperature (150 C) was increased to 180 C at a rate 3 C/min and then at 25 C/min to a final temperature of 320 C. The final temperature was maintained for 10 min. The carrier gas was H₂ at a linear velocity of 51 cm/sec. Detection was by flame ionization. Data analysis was performed using Agilent ChemStation software. Each sugar was quantified relative to the internal standard and detector responses were applied for each individual carbohydrate (calculated from standards run with each set of samples). Final carbohydrate concentrations were expressed on a tissue dry weight basis.

### Protein Analysis

[0453] Protein contents were estimated by combustion analysis on a Thermo Finnigan Flash 1112EA combustion analyzer. Samples, 4-8 mg, weighed to an accuracy of 0.001 mg on a Mettler-Toledo MX5 micro balance were used for analysis. Protein contents were calculated by multiplying % N, determined by the analyzer, by 6.25. Final protein contents were expressed on a percent tissue dry weight basis.

### Example 6

### Compositional Analysis of T1 Seed from Soil19 Event/Plant AFS 8407.2.2.1

[0454] Eight transgenic seed from Soil19 Event/Plant AFS 8407.2.2.1 (8407-2-2-1-74, 8407-2-2-1-53, 8407-2-2-1-65, 8407-2-2-1-80, 8407-2-2-1-60, 8407-2-2-1-51, 8407-2-2-1-70, 8407-2-2-1-63 from Table 3) and the eight null seed from Soil19 Event/Plant AFS 8407-2-2-1 (seed 8407-2-2-1-61, 8407-2-2-1-69, 8407-2-2-1-66, 8407-2-2-1-50, 8407-2-2-1-62, 8407-2-2-1-64, 8407-2-2-1-58, 8407-2-2-1-68 from Table 3) were combined together, respectively, and ground to a powder using the genogrinder as described herein.

[0455] Non-structural soluble carbohydrate and protein from the chosen Soil19 T1 seed transgenic and null powders were quantified using the methods described in Example 5 and oil content of powders was determined by NMR as described herein and results are presented in Table 5a.

[0456] In Table 5a, individual soluble carbohydrates (pinitol, sorbitol, fructose, glucose, sucrose, galactinol, raffinose, stachyose) as well as protein and oil are reported as a percent of ground soy powder. Also presented are the total rafinosaccharides (Total Rafs; sum of raffinose and stachyose) and total soluble carbohydrates (Total Carbs; sum of individual carbohydrates). Percent increase or decrease in any particular soluble carbohydrate or protein or oil as is also shown in Table 5a where the percent is calculated in the following way; [(transgenic value-null value)/null value×100%].

TABLE 5a
Soluble carbohydrate, protein and oil content of bulk powders from null
and transgenic Soil19 event AFS 8407.2.2.1 soybean.
Soluble Carboydrates

| Sample | Pinitol | Sorbitol | Fructose | Glucose | Sucrose | Galactinol | Raffinose | Stachyose | Total Rafs | Total Carb | Protein | Oil |
|---|---|---|---|---|---|---|---|---|---|---|---|---|
| Soil 19 | 0.25 | 0 | 0.02 | 0.05 | 4.88 | 0.22 | 1.04 | 5.74 | 6.79 | 12.2 | 37.5 | 22.8 |
| Null | | | | | | | | | | | | |
| Soil 19 | 0.49 | 0 | 0.00 | 0.02 | 6.56 | 0.31 | 0.75 | 0.44 | 1.19 | 8.5 | 37.7 | 27.5 |
| Trans | | | | | | | | | | | | |
| % Change | 96 | | −100 | −57 | 35 | 41 | −28 | −92 | −83 | −30 | 1 | 20 |

[0457] Table 5a shows a percent increase in oil in transgenic Soil19 seed of 20%, a percent increase in protein of 1%, a percent increase in sucrose of 35%, a percent decrease in raffinosaccharides of 83% and a percent decrease in total carbohydrates of 30%, when compared to null segregant Soil19 soybean seed.

[0458] A soybean meal can be generated by one skilled in the art by extracting the oil component away from the ground seed powder. Given the oil, protein and total soluble carbohydrate compositions shown in Table 5a, the resulting protein and soluble carbohydrate compositions can be calculated for a soybean meal and these are shown in Table 5b.

[0459] In Table 5b, individual soluble carbohydrates (pinitol, sorbitol, fructose, glucose, sucrose, galactinol, raffinose, stachyose) and protein are reported as a percent of soybean meal. Also presented are the total rafinosaccharides (Total Rafs; sum of raffinose and stachyose) and total soluble carbohydrates (Total Carbs; sum of individual carbohydrates). Soybean meal composition for each component was calculated by dividing the percent of an individual meal component in soybean powder by (100 percent minus the percent oil in soybean powder). For example, in the case of the Soil19 null shown in Table 5b, the percent protein in the soybean meal becomes [% protein/(100-% oil)=37.5/(100-22.8)] which results in 48.6% protein in soybean meal from that seed. A similar calculation was performed for each component from Table 5a and is shown in Table 5b. Percent increase or decrease for each component in the soybean meal is also shown in Table 5b where the percent is calculated in the following way; [(transgenic value-null value)/null value×100%].

TABLE 5b
Soluble carbohydrate and protein of soybean meal generated from null
and transgenic Soil19 event AFS 8407.2.2.1 soybean.

| Sample | Pinitol | Sorbitol | Fructose | Glucose | Sucrose | Galactinol | Raffinose | Stachyose | Total Rafs | Total Carbs | Protein |
|---|---|---|---|---|---|---|---|---|---|---|---|
| Soil19 | 0.3 | 0.0 | 0.0 | 0.1 | 6.3 | 0.3 | 1.3 | 7.4 | 8.8 | 15.8 | 48.6 |
| Null | | | | | | | | | | | |
| Soil19 | 0.7 | 0.0 | 0.0 | 0.0 | 9.0 | 0.4 | 1.0 | 0.6 | 1.6 | 11.8 | 52.0 |
| Trans | | | | | | | | | | | |
| % | 109 | | −100 | −57 | 43 | 50 | −23 | −92 | −81 | −25 | 7 |
| Change | | | | | | | | | | | |

[0460] Table 5b shows an increase in protein in transgenic Soil19 soybean meal of 7%, an increase in sucrose of 43%, a decrease in raffinosaccharides of 81% and a decrease in total carbohydrates of 25%, when compared to null segregant Soil19 soybean meal.

Compositional Analysis of T1 Seed from Soil19 Event/Plant AFS 8377.1.2.1

[0461] The thirty six individual T1 seed from Soil19 Event/Plant AFS 8377.1.2.1 (Tables 3&4) were ground to a powder using the genogrinder as described herein. Non-structural soluble carbohydrate and protein from each transgenic and null powders (as determined with fatty acid profile and TLC result in Table 3 were quantified using the methods described in Example 2 and oil content of powders was determined by NMR as described herein and results are presented in Table 6a.

[0462] In Table 6a, individual soluble carbohydrates (pinitol, sorbitol, fructose, glucose, sucrose, galactinol, raffinose, stachyose) as well as protein and oil are for individual seed are reported as a percent of ground soy powder. Also presented are the total rafinosaccharides (Total Rafs; sum of raffinose and stachyose) and total soluble carbohydrates (Total Carbs; sum of individual carbohydrates).

[0463] In Table 6a, the average value for all transgenic seed or null seed is shown (Avg.). Additionally, the percent increase or decrease (percent change) for the average of any particular soluble carbohydrate, protein or oil as is also shown in Table 6a where the percent is calculated in the following way; [(transgenic value-null value)/null value×100%].

TABLE 6a
Fatty acid profile and soluble carbohydrate, protein and oil content of
individual seed from null and transgenic Soil19 event AFS 8377.1.2.1 soybean.

| Seed # | Pinitol | Sorbitol | Fructose | Glucose | Sucrose | Galactinol | Raffinose | Stachyose | Total Rafs | Total Carbs | Protein | Oil |
|---|---|---|---|---|---|---|---|---|---|---|---|---|
| 36 | 0.70 | 0 | 0.07 | 0.06 | 9.03 | 0.02 | 0.58 | 0.25 | 0.82 | 10.71 | 43.1 | 23.5 |
| 7 | 0.64 | 0 | 0.11 | 0.12 | 7.14 | 0.02 | 0.28 | 0.12 | 0.41 | 8.43 | 45.6 | 23.3 |
| 11 | 0.46 | 0 | 0.09 | 0.08 | 8.74 | 0.02 | 0.50 | 0.24 | 0.74 | 10.14 | 39.7 | 24.8 |
| 30 | 0.60 | 0 | 0.11 | 0.14 | 6.70 | 0.02 | 0.36 | 0.22 | 0.57 | 8.14 | 45.0 | 24.3 |
| 26 | 0.62 | 0 | 0.08 | 0.07 | 6.99 | 0.02 | 0.42 | 0.26 | 0.68 | 8.45 | 43.7 | 25.0 |
| 4 | 0.70 | 0 | 0.08 | 0.07 | 6.69 | 0.02 | 0.34 | 0.22 | 0.55 | 8.11 | 44.9 | 23.6 |
| 5 | 0.48 | 0 | 0.12 | 0.16 | 7.59 | 0.01 | 0.36 | 0.18 | 0.55 | 8.90 | 46.3 | 22.8 |
| 31 | 0.55 | 0 | 0.11 | 0.14 | 8.15 | 0.02 | 0.42 | 0.22 | 0.64 | 9.61 | 47.1 | 21.4 |
| 29 | 0.68 | 0 | 0.12 | 0.12 | 7.42 | 0.02 | 0.46 | 0.30 | 0.76 | 9.13 | 43.9 | 21.9 |
| 15 | 0.44 | 0 | 0.08 | 0.10 | 8.01 | 0.02 | 0.41 | 0.26 | 0.67 | 9.33 | 47.4 | 20.7 |
| 8 | 0.53 | 0 | 0.10 | 0.15 | 7.31 | 0.02 | 0.51 | 0.39 | 0.90 | 9.01 | 43.8 | 24.1 |
| 8 | 0.74 | 0 | 0.11 | 0.09 | 6.96 | 0.02 | 0.61 | 0.58 | 1.19 | 9.12 | 42.2 | 24.7 |
| 33 | 0.78 | 0 | 0.07 | 0.05 | 8.00 | 0.03 | 0.82 | 0.63 | 1.45 | 10.38 | 41.6 | 24.5 |
| 25 | 0.52 | 0 | 0.10 | 0.07 | 9.07 | 0.03 | 0.82 | 0.74 | 1.57 | 11.36 | 43.7 | 22.7 |
| 19 | 0.80 | 0 | 0.11 | 0.08 | 7.50 | 0.02 | 0.62 | 0.57 | 1.19 | 9.70 | 43.0 | 22.4 |
| 9 | 0.49 | 0 | 0.04 | 0.06 | 8.61 | 0.02 | 0.52 | 0.37 | 0.89 | 10.10 | 48.4 | 21.6 |
| 16 | 0.71 | 0 | 0.10 | 0.08 | 8.51 | 0.24 | 0.49 | 0.23 | 0.72 | 10.35 | 47.6 | 20.3 |
| 22 | 0.63 | 0 | 0.03 | 0.04 | 6.94 | 0.02 | 0.51 | 0.49 | 0.99 | 8.66 | 47.5 | 21.9 |
| 35 | 0.51 | 0 | 0.06 | 0.05 | 8.24 | 0.02 | 0.66 | 0.47 | 1.13 | 10.01 | 41.7 | 24.1 |
| 14 | 0.51 | 0 | 0.08 | 0.05 | 7.00 | 0.25 | 0.44 | 0.42 | 0.86 | 8.75 | 49.1 | 20.6 |
| 17 | 0.99 | 0 | 0.11 | 0.07 | 6.85 | 0.02 | 0.49 | 0.40 | 0.88 | 8.92 | 50.0 | 20.2 |
| 21 | 0.46 | 0 | 0.03 | 0.04 | 6.48 | 0.02 | 0.55 | 0.60 | 1.15 | 8.19 | 47.0 | 22.9 |
| 1 | 0.26 | 0 | 0.04 | 0.05 | 3.69 | 0.01 | 0.24 | 0.13 | 0.37 | 4.43 | 44.8 | 21.7 |
| 6 | 0.73 | 0 | 0.10 | 0.15 | 7.17 | 0.02 | 0.55 | 0.44 | 0.98 | 9.15 | 48.0 | 20.9 |
| 28 | 0.43 | 0 | 0.08 | 0.07 | 7.46 | 0.02 | 0.67 | 0.65 | 1.32 | 9.37 | 44.2 | 22.2 |
| 10 | 0.44 | 0 | 0.04 | 0.07 | 7.38 | 0.02 | 0.60 | 0.55 | 1.14 | 9.09 | 46.7 | 22.6 |
| 32 | 0.51 | 0 | 0.10 | 0.12 | 6.98 | 0.02 | 0.45 | 0.27 | 0.72 | 8.45 | 45.6 | 24.8 |
| 23 | 0.85 | 0 | 0.03 | 0.04 | 6.11 | 0.01 | 0.58 | 0.45 | 1.03 | 8.08 | 53.1 | 17.8 |
| 20 | 0.82 | 0 | 0.09 | 0.09 | 6.53 | 0.02 | 0.51 | 0.40 | 0.91 | 8.45 | 48.1 | 18.8 |
| Avg. | 0.61 | 0 | 0.08 | 0.08 | 7.35 | 0.04 | 0.51 | 0.38 | 0.89 | 9.05 | 45.6 | 22.4 |
| Trans | | | | | | | | | | | | |
| 24 | 0.29 | 0 | 0.04 | 0.03 | 5.51 | 0.07 | 0.61 | 5.71 | 6.32 | 12.26 | 42.6 | 19.8 |
| 34 | 0.33 | 0 | 0.04 | 0.04 | 5.13 | 0.05 | 0.68 | 5.49 | 6.17 | 11.76 | 42.5 | 19.8 |
| 3 | 0.26 | 0 | 0.09 | 0.06 | 4.90 | 0.06 | 1.07 | 6.51 | 7.58 | 12.95 | 44.1 | 19.1 |
| 2 | 0.32 | 0 | 0.07 | 0.04 | 5.72 | 0.04 | 0.85 | 4.32 | 5.17 | 11.36 | 46.2 | 18.4 |
| 13 | 0.22 | 0 | 0.10 | 0.09 | 6.92 | 0.04 | 0.71 | 4.96 | 5.67 | 13.03 | 41.8 | 18.3 |
| 12 | 0.21 | 0 | 0.04 | 0.04 | 5.92 | 0.03 | 0.80 | 4.84 | 5.64 | 11.89 | 44.4 | 17.3 |
| 27 | 0.43 | 0 | 0.05 | 0.04 | 4.22 | 0.05 | 1.04 | 4.67 | 5.70 | 10.50 | 49.0 | 17.1 |
| Avg. | 0.29 | 0 | 0.06 | 0.05 | 5.47 | 0.05 | 0.82 | 5.21 | 6.04 | 11.96 | 44.4 | 18.5 |
| Null | | | | | | | | | | | | |
| % | 105.7 | | 34.3 | 71.7 | 34.3 | −28.4 | −38.1 | −92.7 | −85.3 | −24.3 | 2.8 | 20.9 |
| Change | | | | | | | | | | | | |

[0464] Table 6a shows an increase in oil in transgenic Soil19 seed of 21%, an increase in protein of 3%, an increase in sucrose of 34%, a decrease in raffinosaccharides of 85%, and a decrease in total carbohydrates of 24% when compared to null segregants Soil19 soybean seed.

[0465] A soybean meal can be generated by one skilled in the art and the resulting protein and soluble carbohydrate compositions can be calculated for the resulting soybean meal using the composition obtained for the seed as described above. Given the average oil, protein and total soluble carbohydrate compositions shown in Table 6a, the resulting average protein and soluble carbohydrate compositions can be calculated for a soybean meal, as described above, and these are shown in Table 6b.

TABLE 6b
Soluble carbohydrate and protein of soybean meal generated from null
and transgenic Soil19 event AFS 8377.1.2.1 soybean.

| | Pinitol | Sorbitol | Fructose | Glucose | Sucrose | Galactinol | Raffinose | Stachyose | Total Rafs | Total Carbs | Protein |
|---|---|---|---|---|---|---|---|---|---|---|---|
| Avg. Trans | 0.8 | 0.0 | 0.1 | 0.1 | 9.5 | 0.1 | 0.7 | 0.5 | 1.1 | 11.7 | 58.8 |
| Avg. Null | 0.4 | 0.0 | 0.1 | 0.1 | 6.7 | 0.1 | 1.0 | 6.4 | 7.4 | 14.7 | 54.5 |
| % Change | 121 | | 40 | 68 | 41 | −16 | −35 | −92 | −85 | −21 | 8% |

[0466] Table 6b shows an increase in protein in average transgenic Soil19 soybean meal of 8%, an increase in sucrose of 41%, a decrease in raffinosaccharides of 85% and a decrease in total carbohydrates of 21%, when compared to null segregant Soil19 soybean meal.

### Example 7

### Generation of Soybean Lines with Seed-Targeted Silencing of Galactinol Synthase, Fad2, fatB and Fad3 and Seed Targeted Over-Expression of DGAT Enzymes (YLDGAT2 or Gm-DGAT1-09010011)

[0467] Fad2-1 b/fatBF/fad3c amiRNA Cassette

[0468] The NotI fragment of pKR1776 (SEQ ID NO: 23), containing the 396b-fad2-1b/159-fatBF/159-fad3c triple amiRNA, was cloned into the NotI fragment of pKR1850 (SEQ ID NO: 5), containing the Annexin promoter, to produce pKR1896 (SEQ ID NO: 24).

Stacking Fad2-1 b/fatBF/fad3c amiRNA Cassette with YLDGAT2

[0469] The NotI fragment of KS362 (SEQ ID NO: 25), containing the YLDGAT2, was cloned into the NotI site of pKR264 (SEQ ID NO:26) to produce pKR1972 (SEQ ID NO: 27).

[0470] The BsiWI fragment of pKR1972 (SEQ ID NO: 27), containing the Gy1/YLDGAT2/leg term cassette, was cloned into the BsiWI site of pKR1896 (SEQ ID NO: 24) to produce pKR2085 (SEQ ID NO: 28).

### Site-Specific Integration Donor Vector

[0471] Using standard PCR and cloning methods by one skilled in the art, DNA elements were assembled to produce a 6673 by basic donor construct pKR2008 (SEQ ID NO: 29). Donor construct pKR2008 (SEQ ID NO: 29) is substantially similar to donor plasmid pKR1857 (SEQ ID NO: 14) except that the soybean acetolactate synthase (als) gene coding region encoding a mutant ALS enzyme insensitive to sulfonylurea herbicides comprises a P178S mutation in the encoded protein (previously described in Haughn, G. W., J. Smith, B. Mazur, et al. 1988. Transformation with a mutant Arabidopsis acetolactate synthase gene renders tobacco resistant to sulfonylurea herbicides Molecular and General Genetics MGG February 1988, Volume 211, Issue 2, pp 266-271) rather than the P178A mutation in pKR1857 (SEQ ID NO: 14). In addition, following the ALS gene sequence, the endogenous ALS transcription terminator sequence is utilized instead of the PINII terminator in pKR1857 (SEQ ID NO: 14).

[0472] Donor construct pKR2008 (SEQ ID NO: 29) is comprised of the following DNA elements.

[0473] Sequence 3989-4036 is a FLP recombinase recognition site FRT1. Sequence 4051-6003 is the soybean acetolactate synthase (als) gene coding region encoding a mutant ALS enzyme insensitive to sulfonylurea herbicides and having a P178S mutation in the encoded protein. Sequence 6007-6657 is the ALS transcription terminator. Sequence 35-50 is a sequence of DNA comprising ORF stop codons in all 6 frames (ORFSTOP-A). Sequence 53-1222 is the phaseolin transcription terminator. Sequence 1254-1270 is a sequence of DNA comprising ORF stop codons in all 6 frames (ORFSTOP-B). Sequence 1343-1390 is a FLP recombinase recognition site FRT87. Sequence 1403-3924 is vector backbone containing the T7 promoter (sequence 2638-2733), the hygromycin phosphotransferase (hpt) gene coding region (sequence 2734-3756) and the T7 terminator (sequence 3781-3913).

Stacking the Fad2-1 b/fatBF/fad3c amiRNA and Galactinol Synthase Silencing Cassettes with YLDGAT2 in an SSI Donor Vector

[0474] The AscI fragment of pKR2085 (SEQ ID NO: 28), containing the fad2-1b/fatBF/fad3c amiRNA and YLDGAT2 cassettes, was cloned into the AscI site of construct pKR2008 (SEQ ID NO: 29) to produce pKR2087 (SEQ ID NO: 30).

[0475] The SbfI fragment of pKR1292 (SEQ ID NO: 18) was cloned into the SbfI site of pKR2087 (SEQ ID NO: 30) to produce pKR2101 (SEQ ID NO: 31). In this way, YLDGAT2 overexpression and fad2, fatB, fad3 and galactinol synthase gene silencing cassettes were stacked together in one SSI donor construct. Plasmid pKR2101 (SEQ ID NO: 31) was also given the designation PHP52246.

[0476] Stacking Fad2-1b/fatBF/fad3c amiRNA Cassette with GM-DGAT1-C9C10C11

[0477] Construction of a plasmid pLF179 (SEQ ID NO: 32) containing the modified soy DGAT1 gene (GM-DGAT1-C9C10C11) flanked by NotI sites was previously described (Applicants' Assignee's U.S. Pat. No. 8,101,819; Issued January 24th, 2102).

[0478] The NotI fragment of pLF179 (SEQ ID NO: 32), containing the GM-DGAT1-C9C10C11, was cloned into the NotI site of pKR264 (SEQ ID NO:26) to produce pKR1995 (SEQ ID NO: 33).

[0479] The BsiWI fragment of pKR1995 (SEQ ID NO: 33), containing the Gy1/GM-DGAT1-09010011/leg term cassette, was cloned into the BsiWI site of pKR1896 (SEQ ID NO: 24) to produce pKR2086 (SEQ ID NO: 34).

[0480] Stacking the Fad2-1 b/fatBF/fad3c amiRNA and Galactinol Synthase Silencing Cassettes with GM-DGAT1-09010011 in an SSI Donor Vector

[0481] The AscI fragment of pKR2086 (SEQ ID NO: 34), containing the fad2-1b/fatBF/fad3c amiRNA and GM-DGAT1-09010011 cassettes, was cloned into the AscI site of construct pKR2008 (SEQ ID NO: 29) to produce pKR2088 (SEQ ID NO: 35).

[0482] The SbfI fragment of pKR1292 (SEQ ID NO: 18) was cloned into the SbfI site of pKR2088 (SEQ ID NO: 35) to produce pKR2102 (SEQ ID NO: 36). In this way, GM-DGAT1-09010011 overexpression and fad2, fatB, fad3 and galactinol synthase gene silencing cassettes were stacked together in one SSI donor construct. Plasmid pKR2102 (SEQ ID NO: 36) was also given the designation PHP52247.

### Example 8

### Generation of Soybean Lines with Seed-Targeted Silencing of Galactinol Synthase, Fad2, fatB and Fad3 and Seed Targeted Over-Expression of DGAT Enzymes (YLDGAT2 or Gm-DGAT1-09010011)

[0483] Transformation into Soy SSI Target Events

[0484] Target line A cultures were retransformed with the donor construct PHP52246 (SEQ ID NO: 37) and the FLP recombinase construct PHP44664 (SEQ ID NO: 21) using intact plasmid at a 9:3 pg/bp/prep ratio with the biolistic bombardment transformation and events were selected as described elsewhere herein. The experiment name given for this transformation was Soil42.

[0485] Target line A cultures were similarly retransformed with the donor construct PHP52247 (SEQ ID NO: 36) and the FLP recombinase construct PHP44664 (SEQ ID NO: 21) using intact plasmid at a 9:3 pg/bp/prep ratio with the biolistic bombardment transformation and events were selected as described elsewhere here in. The experiment name given for this transformation was Soil43.

[0486] Soil42 or Soil43 events created through RMCE bring the promoter-less als(P178S) coding region of donor construct PHP52246 (SEQ ID NO: 31) or PHP52247 (SEQ ID NO: 36) downstream of the scp1 promoter of QC288A in target line A for expression and thus chlorsulfuron resistance, respectively.

[0487] When the frt1 and frt87 sites from Target line A recombine with those in plasmid PHP52246 (SEQ ID NO: 31) in a successful recombination mediated cassette exchange (RMCE), a new DNA sequence is generated in the genomic DNA as set forth in SEQ ID NO: 37.

[0488] When the frt1 and frt87 sites from Target line A recombine with those in plasmid PHP52247 (SEQ ID NO: 36) in a successful recombination mediated cassette exchange (RMCE), a new DNA sequence is generated in the genomic DNA as set forth in SEQ ID NO: 38.

### T0 Embryo and Plant Analysis and Event Selection

[0489] Resulting transgenic Soil42 and Soil43 events were selected, maintained and somatic embryos matured as described herein.

[0490] Soil42 and Soil43 events were sampled at the somatic embryo stage and screened using construct-specific quantitative PCR (qPCR) as described previously in Assignee's U.S. Pat. No. 8,293,533) issued 2012 Oct. 23 with oligos designed to check for DNA recombination around the FRT1 site and to check for the presence of target, donor, and Flp DNA. Somatic embryos from those Soil42 and Soil43 events that were positive for correct recombination around the FRT1 site were also analyzed for fatty acid profile using GC-FAME and oil content by NMR on ground embryo powder with methods exactly as described herein.

[0491] The results for the qPCR, fatty acid and oil analysis of Soil42 and Soil43 events are shown in Table 7 and Table 8, respectively. Based on the qPCR, fatty acid composition and oil content data, events were kept as indicated in Table 7 and 8.

TABLE 7
qPCR, fatty acid composition and oil content of embryos from experiment
Soil42.

| | Fatty Acid Composition | | | | | | | | | | Event |
|---|---|---|---|---|---|---|---|---|---|---|---|
| Soil42 | (wt. %) | | | | | | qPCR Result | | | | Keep |
| Event | 16:0 | 18:0 | 18:1 | 18:2 | 18:3 | % Oil | FRT1 | Donor | Target | FLP | Status |
| AFS | 9.0 | 3.5 | 53.1 | 22.8 | 11.6 | 5.9 | 0.57 | 0.00 | 0.00 | 0.00 | Keep |
| 8720- | | | | | | | | | | | |
| 4-1 | | | | | | | | | | | |
| AFS | 16.6 | 5.1 | 27.7 | 33.1 | 17.4 | 3.3 | 0.88 | 0.00 | 0.00 | 0.00 | Keep |
| 8720- | | | | | | | | | | | |
| 5-1 | | | | | | | | | | | |
| AFS | 8.5 | 3.2 | 43.1 | 31.1 | 14.1 | 3.3 | 0.00 | 1.71 | 0.99 | 1.00 | Throw |
| 8720- | | | | | | | | | | | |
| 5-2 | | | | | | | | | | | |
| AFS | 17.4 | 4.0 | 26.4 | 38.3 | 13.9 | 5.7 | 0.49 | 0.00 | 0.00 | 0.00 | Keep |
| 8720- | | | | | | | | | | | |
| 5-3 | | | | | | | | | | | |
| AFS | 17.7 | 4.2 | 20.1 | 36.4 | 21.7 | 5.8 | 0.31 | 0.00 | 0.00 | 0.00 | Keep |
| 8720- | | | | | | | | | | | |
| 5-4 | | | | | | | | | | | |
| AFS | 4.3 | 2.0 | 48.8 | 35.8 | 9.1 | 4.8 | 0.83 | 0.84 | 0.00 | 0.00 | Keep |
| 8720- | | | | | | | | | | | |
| 6-1 | | | | | | | | | | | |
| AFS | 5.7 | 2.3 | 55.0 | 27.5 | 9.5 | 5.7 | 1.20 | 0.00 | 0.00 | 0.00 | Keep |
| 8720- | | | | | | | | | | | |
| 8-1 | | | | | | | | | | | |
| AFS | 18.0 | 4.2 | 21.3 | 38.6 | 17.9 | 3.2 | 0.68 | 0.42 | 0.81 | 0.83 | Keep |
| 8720- | | | | | | | | | | | |
| 8-2 | | | | | | | | | | | |
| AFS | 11.5 | 3.4 | 35.1 | 36.7 | 13.3 | 3.3 | 1.01 | 0.00 | 0.00 | 0.00 | Keep |
| 8720- | | | | | | | | | | | |
| 8-3 | | | | | | | | | | | |
| AFS | 12.9 | 3.7 | 28.0 | 40.1 | 15.3 | 3.3 | 1.42 | 0.00 | 0.00 | 0.00 | Keep |
| 8720- | | | | | | | | | | | |
| 8-4 | | | | | | | | | | | |
| AFS | 11.7 | 3.8 | 34.4 | 37.4 | 12.8 | 3.4 | 1.27 | 0.00 | 0.00 | 0.00 | Keep |
| 8720- | | | | | | | | | | | |
| 8-5 | | | | | | | | | | | |
| AFS | 8.8 | 2.8 | 47.4 | 29.0 | 12.1 | 4.6 | 1.54 | 0.00 | 0.00 | 0.00 | Keep |
| 8720- | | | | | | | | | | | |
| 8-6 | | | | | | | | | | | |
| AFS | 6.5 | 2.9 | 53.5 | 27.3 | 9.7 | 5.1 | 1.51 | 4.66 | 0.00 | 0.00 | Keep |
| 8720- | | | | | | | | | | | |
| 11-1 | | | | | | | | | | | |
| AFS | 9.2 | 3.7 | 41.7 | 29.8 | 15.6 | 7.0 | 1.08 | 0.00 | 0.00 | 0.00 | Keep |
| 8720- | | | | | | | | | | | |
| 12-1 | | | | | | | | | | | |
| AFS | 15.0 | 3.6 | 21.5 | 41.0 | 18.9 | 4.1 | 0.70 | 4.26 | 0.00 | 0.00 | Keep |
| 8720- | | | | | | | | | | | |
| 12-2 | | | | | | | | | | | |
| AFS | 8.6 | 3.6 | 45.7 | 27.7 | 14.4 | 7.2 | 1.02 | 0.00 | 0.00 | 0.00 | Keep |
| 8720- | | | | | | | | | | | |
| 12-3 | | | | | | | | | | | |

TABLE 8
qPCR, fatty acid composition and oil content of embryos from experiment
Soil43.

| | Fatty Acid Composition | | | | | | | | | | Event |
|---|---|---|---|---|---|---|---|---|---|---|---|
| Soil43 | (wt. %) | | | | | | qPCR Result | | | | Keep |
| Event | 16:0 | 18:0 | 18:1 | 18:2 | 18:3 | % Oil | FRT1 | Donor | Target | FLP | Status |
| AFS | 5.6 | 3.1 | 63.0 | 21.8 | 6.5 | 8.2 | 1.5 | 1.5 | 0.0 | 0.0 | Keep |
| 8738- | | | | | | | | | | | |
| 1-1 | | | | | | | | | | | |
| AFS | 12.2 | 3.7 | 44.0 | 26.4 | 13.6 | 4.9 | 1.8 | 0.0 | 0.0 | 0.0 | Keep |
| 8738- | | | | | | | | | | | |
| 2-1 | | | | | | | | | | | |
| AFS | 14.6 | 6.5 | 33.0 | 34.6 | 11.3 | 4.6 | 1.4 | 1.7 | 0.0 | 0.0 | Keep |
| 8738- | | | | | | | | | | | |
| 6-1 | | | | | | | | | | | |
| AFS | 5.1 | 3.9 | 65.9 | 18.6 | 6.4 | 7.1 | 2.0 | 1.1 | 0.0 | 0.0 | Keep |
| 8738- | | | | | | | | | | | |
| 7-1 | | | | | | | | | | | |
| AFS | 5.6 | 4.1 | 65.3 | 18.5 | 6.5 | 6.4 | 0.0 | 0.0 | 0.0 | 0.0 | Throw |
| 8738- | | | | | | | | | | | |
| 7-2 | | | | | | | | | | | |
| AFS | 3.4 | 2.7 | 71.2 | 19.0 | 3.7 | 9.4 | 2.2 | 8.6 | 0.0 | 0.0 | Keep |
| 8738- | | | | | | | | | | | |
| 7-3 | | | | | | | | | | | |
| AFS | 7.8 | 3.3 | 53.3 | 25.7 | 9.9 | 5.6 | 1.2 | 0.0 | 0.0 | 0.0 | Keep |
| 8738- | | | | | | | | | | | |
| 7-4 | | | | | | | | | | | |
| AFS | 13.4 | 4.9 | 32.3 | 36.5 | 12.9 | 6.2 | 1.5 | 0.0 | 0.0 | 0.0 | Keep |
| 8738- | | | | | | | | | | | |
| 8-1 | | | | | | | | | | | |
| AFS | 5.7 | 3.6 | 65.5 | 20.3 | 4.9 | 8.3 | 1.4 | 0.0 | 1.0 | 1.0 | Keep |
| 8738- | | | | | | | | | | | |
| 8-2 | | | | | | | | | | | |
| AFS | 2.9 | 3.0 | 71.3 | 19.2 | 3.6 | 9.3 | 0.7 | 1.5 | 0.0 | 0.0 | Keep |
| 8738- | | | | | | | | | | | |
| 8-3 | | | | | | | | | | | |
| AFS | 2.9 | 3.1 | 69.7 | 20.8 | 3.4 | 8.6 | 0.0 | 2.4 | 0.0 | 0.0 | Throw |
| 8738- | | | | | | | | | | | |
| 8-4 | | | | | | | | | | | |
| AFS | 2.9 | 2.3 | 68.9 | 22.4 | 3.5 | 7.0 | 0.0 | 3.0 | 0.0 | 0.0 | Throw |
| 8738- | | | | | | | | | | | |
| 8-5 | | | | | | | | | | | |
| AFS | 10.0 | 3.8 | 35.3 | 36.1 | 14.8 | 6.1 | 0.0 | 0.6 | 0.0 | 0.0 | Throw |
| 8738- | | | | | | | | | | | |
| 8-6 | | | | | | | | | | | |
| AFS | 3.3 | 3.1 | 69.8 | 20.3 | 3.5 | 5.8 | 0.0 | 5.7 | 0.0 | 0.0 | Throw |
| 8738- | | | | | | | | | | | |
| 8-7 | | | | | | | | | | | |
| AFS | 6.4 | 3.2 | 54.6 | 27.6 | 8.3 | 5.2 | 1.1 | 0.5 | 0.0 | 0.0 | Keep |
| 8738- | | | | | | | | | | | |
| 8-8 | | | | | | | | | | | |
| AFS | 4.8 | 3.1 | 67.0 | 20.3 | 4.8 | 8.4 | 2.0 | 0.0 | 1.0 | 1.0 | Keep |
| 8738- | | | | | | | | | | | |
| 8-9 | | | | | | | | | | | |
| AFS | 5.3 | 2.9 | 61.6 | 24.1 | 6.0 | 8.2 | 1.9 | 1.8 | 0.0 | 0.0 | Keep |
| 8738- | | | | | | | | | | | |
| 8-10 | | | | | | | | | | | |
| AFS | 6.1 | 3.4 | 57.8 | 26.6 | 6.1 | 8.4 | 0.0 | 13.3 | 1.4 | 1.4 | Throw |
| 8738- | | | | | | | | | | | |
| 9-1 | | | | | | | | | | | |
| AFS | 10.6 | 4.3 | 42.0 | 32.2 | 10.9 | 5.9 | 1.8 | 0.0 | 0.0 | 0.0 | Keep |
| 8738- | | | | | | | | | | | |
| 9-2 | | | | | | | | | | | |
| AFS | 9.8 | 4.3 | 40.5 | 34.8 | 10.7 | 6.9 | 1.5 | 0.0 | 0.0 | 0.0 | Keep |
| 8738- | | | | | | | | | | | |
| 9-3 | | | | | | | | | | | |
| AFS | 3.9 | 3.1 | 66.2 | 21.4 | 5.4 | 7.2 | 0.0 | 6.6 | 0.0 | 0.0 | Throw |
| 8738- | | | | | | | | | | | |
| 9-4 | | | | | | | | | | | |
| AFS | 5.0 | 3.3 | 64.3 | 21.9 | 5.6 | 6.2 | 3.7 | 0.0 | 0.0 | 0.0 | Keep |
| 8738- | | | | | | | | | | | |
| 10-1 | | | | | | | | | | | |
| AFS | 3.0 | 2.9 | 72.7 | 18.5 | 2.9 | 8.2 | 0.0 | 16.1 | 0.0 | 0.0 | Throw |
| 8738- | | | | | | | | | | | |
| 10-2 | | | | | | | | | | | |
| AFS | 7.7 | 3.8 | 55.6 | 23.9 | 9.1 | 4.1 | 1.3 | 0.0 | 0.0 | 0.0 | Keep |
| 8738- | | | | | | | | | | | |
| 11-1 | | | | | | | | | | | |
| AFS | 7.1 | 3.4 | 50.6 | 27.6 | 11.3 | 3.9 | 1.0 | 0.0 | 1.3 | 1.3 | Keep |
| 8738- | | | | | | | | | | | |
| 11-2 | | | | | | | | | | | |
| AFS | 5.5 | 3.5 | 63.8 | 21.2 | 6.0 | 6.4 | 1.6 | 0.0 | 0.0 | 0.0 | Keep |
| 8738- | | | | | | | | | | | |
| 11-3 | | | | | | | | | | | |
| AFS | 6.8 | 3.5 | 55.8 | 26.3 | 7.7 | 6.3 | 1.1 | 0.0 | 0.0 | 0.0 | Keep |
| 8738- | | | | | | | | | | | |
| 12-1 | | | | | | | | | | | |
| AFS | 7.3 | 3.7 | 55.0 | 24.9 | 9.1 | 6.1 | 2.1 | 0.0 | 0.0 | 0.0 | Keep |
| 8738- | | | | | | | | | | | |
| 12-2 | | | | | | | | | | | |

[0492] Somatic embryos from kept Soil42 and Soil43 events were dried, germinated and planted and resulting T0 plants were grown as described herein.

### T1 Seed Oil Content and Fatty Acid Composition Analysis

[0493] Oil content of T1 seed from Soil42 events AFS 8720-8-6 and AFS 8720-12-3 and Soil43 event AFS 8738-11-2 was determined by NMR as described herein. A small seed chip was taken from each T1 seed from each event, seed lipid was hexane extracted and the fatty acid composition determined by GC-FAME as described herein. The remaining seed chip was extracted with methanol and soluble sugars separated and visualized by TLC as described herein (Example 29). The results for oil content, fatty acid profile and sugar composition by TLC for the Soil42 events is shown in Table 9 and for Soil43 in Table 10.

[0494] In Table 9 and 10, oil content is the weight percent oil of total seed weight and the fatty acid profile is the weight percent for individual fatty acids of total fatty acid. The amount of sucrose increase and stachyose decrease as indicated by the TLC plate is scored on a scale of 0-3 where a 0 indicates wild-type levels of sugar and a 3 indicates substantially reduced stachyose and substantially increased sucrose. When a line cell is left blank, the oil, fatty acid profile or TLC score of a seed chip was not determined. In Table 9 and 10, results for each event are divided according to transgenic and null based on the TLC result and/or the oleic acid and total saturated fatty acids (Total Sats) content. Results are then sorted based on oil content. The average value for transgenic or null is indicated at the bottom of each column. A column indicating seed chosen for further compositional analysis is also shown in Table 9 and 10.

TABLE 9
Fatty acid composition, sugar readout and oil content of T1 Seed from
experiment Soil42.

| | | | | | | | | | Chosen |
|---|---|---|---|---|---|---|---|---|---|
| | | | | | | | | Total | for |
| T1 Seed | TLC | % Oil | 16:0% | 18:0% | 18:1% | 18:2% | 18:3% | Sats | Comp |
| AFS | 3 | 24.2 | 3.0 | 3.3 | 82.8 | 5.7 | 5.1 | 6.3 | 1 |
| 8720.8.6.3.34 | | | | | | | | | |
| AFS | 3 | 24.4 | 2.7 | 3.3 | 84.8 | 5.0 | 4.1 | 6.0 | 1 |
| 8720.8.6.3.5 | | | | | | | | | |
| AFS | 3 | 23.4 | 3.3 | 2.7 | 85.4 | 4.3 | 4.3 | 6.0 | 1 |
| 8720.8.6.3.15 | | | | | | | | | |
| AFS | 3 | 23.5 | 3.2 | 3.0 | 82.6 | 5.6 | 5.6 | 6.2 | 1 |
| 8720.8.6.3.14 | | | | | | | | | |
| AFS | 3 | 24.0 | 2.3 | 3.1 | 88.6 | 3.0 | 3.0 | 5.4 | 1 |
| 8720.8.6.3.3 | | | | | | | | | |
| AFS | 3 | 23.6 | 3.4 | 3.4 | 80.4 | 5.9 | 6.8 | 6.9 | |
| 8720.8.6.3.26 | | | | | | | | | |
| AFS | 3 | 22.8 | 3.4 | 3.1 | 77.7 | 7.9 | 7.9 | 6.5 | |
| 8720.8.6.3.30 | | | | | | | | | |
| AFS | 3 | 22.8 | 3.6 | 3.3 | 77.7 | 8.2 | 7.3 | 6.9 | |
| 8720.8.6.3.24 | | | | | | | | | |
| AFS | 3 | 22.8 | 2.6 | 2.8 | 85.7 | 4.2 | 4.7 | 5.4 | |
| 8720.8.6.3.8 | | | | | | | | | |
| AFS | 3 | 22.4 | 3.2 | 3.5 | 81.3 | 6.3 | 5.6 | 6.8 | |
| 8720.8.6.3.21 | | | | | | | | | |
| AFS | 3 | 22.2 | 2.7 | 3.4 | 84.4 | 5.0 | 4.6 | 6.1 | |
| 8720.8.6.3.18 | | | | | | | | | |
| AFS | 3 | 22.0 | 3.7 | 3.1 | 79.4 | 7.4 | 6.4 | 6.8 | |
| 8720.8.6.3.31 | | | | | | | | | |
| AFS | 3 | 21.5 | 2.1 | 2.9 | 85.3 | 4.3 | 5.4 | 5.0 | |
| 8720.8.6.3.28 | | | | | | | | | |
| AFS | 3 | 22.3 | 2.3 | 3.9 | 84.2 | 4.2 | 5.4 | 6.2 | |
| 8720.8.6.3.32 | | | | | | | | | |
| AFS | 3 | 21.6 | 3.7 | 3.1 | 78.2 | 8.4 | 6.6 | 6.8 | |
| 8720.8.6.3.4 | | | | | | | | | |
| AFS | 3 | 21.7 | 4.0 | 3.1 | 74.2 | 9.4 | 9.2 | 7.2 | |
| 8720.8.6.3.12 | | | | | | | | | |
| AFS | 3 | 21.3 | 3.7 | 4.3 | 76.0 | 8.7 | 7.3 | 8.0 | |
| 8720.8.6.3.1 | | | | | | | | | |
| AFS | 3 | 21.4 | 2.9 | 3.3 | 82.1 | 6.0 | 5.6 | 6.3 | |
| 8720.8.6.3.17 | | | | | | | | | |
| AFS | 3 | 21.4 | 4.0 | 3.3 | 75.7 | 10.0 | 7.0 | 7.3 | |
| 8720.8.6.3.2 | | | | | | | | | |
| AFS | 3 | 21.1 | 2.5 | 3.6 | 85.2 | 5.0 | 3.7 | 6.1 | |
| 8720.8.6.3.33 | | | | | | | | | |
| AFS | 3 | 20.9 | 3.9 | 3.3 | 75.6 | 9.9 | 7.4 | 7.1 | |
| 8720.8.6.3.23 | | | | | | | | | |
| AFS | 3 | 20.9 | 3.4 | 3.1 | 77.3 | 8.9 | 7.3 | 6.5 | |
| 8720.8.6.3.36 | | | | | | | | | |
| AFS | 3 | 20.7 | 2.7 | 3.2 | 85.1 | 4.6 | 4.5 | 5.9 | |
| 8720.8.6.3.20 | | | | | | | | | |
| AFS | 3 | 20.5 | 3.7 | 3.3 | 78.1 | 8.5 | 6.4 | 6.9 | |
| 8720.8.6.3.9 | | | | | | | | | |
| AFS | 3 | 19.7 | 3.6 | 2.9 | 76.7 | 7.2 | 9.6 | 6.5 | |
| 8720.8.6.3.19 | | | | | | | | | |
| AFS | 3 | 19.5 | 3.6 | 3.2 | 76.0 | 9.6 | 7.6 | 6.8 | |
| 8720.8.6.3.7 | | | | | | | | | |
| AFS | 3 | 19.0 | 3.5 | 3.4 | 75.6 | 11.0 | 6.6 | 6.8 | |
| 8720.8.6.3.16 | | | | | | | | | |
| AFS | 3 | 17.8 | 3.8 | 3.4 | 75.9 | 9.0 | 7.9 | 7.2 | |
| 8720.8.6.3.11 | | | | | | | | | |
| Trans Avg. | | 21.8 | 3.2 | 3.3 | 80.4 | 6.9 | 6.2 | 6.5 | |
| AFS | 0 | 22.9 | 10.0 | 3.7 | 13.0 | 57.6 | 15.8 | 13.6 | 1 |
| 8720.8.6.3.22 | | | | | | | | | |
| AFS | 0 | 20.8 | 10.4 | 3.7 | 26.7 | 46.0 | 13.2 | 14.1 | 1 |
| 8720.8.6.3.10 | | | | | | | | | |
| AFS | 0 | 20.8 | 11.2 | 4.5 | 19.4 | 52.4 | 12.5 | 15.7 | 1 |
| 8720.8.6.3.25 | | | | | | | | | |
| AFS | 0 | 21.0 | 11.0 | 4.1 | 14.1 | 53.6 | 17.2 | 15.1 | 1 |
| 8720.8.6.3.6 | | | | | | | | | |
| AFS | 0 | 20.1 | 12.4 | 4.1 | 15.3 | 54.1 | 14.1 | 16.5 | 1 |
| 8720.8.6.3.35 | | | | | | | | | |
| AFS | 0 | 20.3 | 12.3 | 3.8 | 16.8 | 52.2 | 14.9 | 16.1 | |
| 8720.8.6.3.29 | | | | | | | | | |
| AFS | 0 | 19.3 | 11.6 | 4.9 | 14.4 | 54.9 | 14.2 | 16.5 | |
| 8720.8.6.3.27 | | | | | | | | | |
| Null Avg. | | 20.7 | 11.3 | 4.1 | 17.1 | 53.0 | 14.6 | 15.4 | |
| AFS | 3 | 25.0 | 2.2 | 2.4 | 86.2 | 4.0 | 5.1 | 4.7 | 1 |
| 8720.12.3.1.3 | | | | | | | | | |
| AFS | 3 | 23.1 | 3.4 | 3.2 | 86.3 | 3.7 | 3.4 | 6.6 | 1 |
| 8720.12.3.1.24 | | | | | | | | | |
| AFS | 3 | 22.6 | 2.6 | 3.0 | 84.5 | 4.4 | 5.4 | 5.7 | 1 |
| 8720.12.3.1.28 | | | | | | | | | |
| AFS | 3 | 23.0 | 2.8 | 2.7 | 86.1 | 4.0 | 4.5 | 5.5 | 1 |
| 8720.12.3.1.19 | | | | | | | | | |
| AFS | 3 | 22.7 | 2.8 | 3.3 | 84.9 | 4.9 | 4.1 | 6.1 | 1 |
| 8720.12.3.1.15 | | | | | | | | | |
| AFS | 3 | 22.6 | 2.7 | 3.4 | 81.6 | 6.2 | 6.1 | 6.1 | |
| 8720.12.3.1.11 | | | | | | | | | |
| AFS | 3 | 22.1 | 2.8 | 2.9 | 84.8 | 4.2 | 5.3 | 5.6 | |
| 8720.12.3.1.8 | | | | | | | | | |
| AFS | 3 | 21.8 | 2.8 | 3.0 | 84.1 | 4.9 | 5.2 | 5.8 | |
| 8720.12.3.1.10 | | | | | | | | | |
| AFS | 3 | 21.9 | 3.1 | 3.0 | 82.4 | 6.3 | 5.2 | 6.1 | |
| 8720.12.3.1.13 | | | | | | | | | |
| AFS | 3 | 21.8 | 3.1 | 2.7 | 84.7 | 4.8 | 4.8 | 5.8 | |
| 8720.12.3.1.6 | | | | | | | | | |
| AFS | 3 | 21.3 | 3.0 | 2.8 | 86.3 | 4.3 | 3.6 | 5.7 | |
| 8720.12.3.1.36 | | | | | | | | | |
| AFS | 3 | 21.7 | 2.7 | 2.7 | 87.2 | 3.4 | 4.0 | 5.4 | |
| 8720.12.3.1.29 | | | | | | | | | |
| AFS | 3 | 21.0 | 2.7 | 3.0 | 84.1 | 6.6 | 3.7 | 5.7 | |
| 8720.12.3.1.26 | | | | | | | | | |
| AFS | 3 | 20.9 | 3.1 | 3.0 | 81.4 | 6.4 | 6.0 | 6.2 | |
| 8720.12.3.1.4 | | | | | | | | | |
| AFS | 3 | 21.6 | 2.8 | 2.7 | 85.3 | 4.5 | 4.7 | 5.5 | |
| 8720.12.3.1.7 | | | | | | | | | |
| AFS | 3 | 21.0 | 2.7 | 3.3 | 83.5 | 5.5 | 5.1 | 6.0 | |
| 8720.12.3.1.32 | | | | | | | | | |
| AFS | 3 | 20.8 | 2.8 | 3.0 | 84.3 | 4.8 | 5.1 | 5.8 | |
| 8720.12.3.1.33 | | | | | | | | | |
| AFS | 3 | 21.2 | 3.3 | 3.5 | 83.3 | 5.0 | 5.0 | 6.7 | |
| 8720.12.3.1.27 | | | | | | | | | |
| AFS | 3 | 21.0 | 3.0 | 2.8 | 84.1 | 4.6 | 5.5 | 5.8 | |
| 8720.12.3.1.21 | | | | | | | | | |
| AFS | 3 | 20.6 | 3.0 | 2.9 | 83.7 | 4.9 | 5.6 | 5.9 | |
| 8720.12.3.1.5 | | | | | | | | | |
| AFS | 3 | 20.5 | 3.2 | 2.8 | 83.9 | 4.9 | 5.1 | 6.0 | |
| 8720.12.3.1.18 | | | | | | | | | |
| AFS | 3 | 20.9 | 2.8 | 3.4 | 81.1 | 7.1 | 5.6 | 6.2 | |
| 8720.12.3.1.2 | | | | | | | | | |
| AFS | 3 | 21.0 | 2.8 | 3.1 | 86.7 | 3.6 | 3.8 | 5.9 | |
| 8720.12.3.1.35 | | | | | | | | | |
| AFS | 3 | 20.6 | 2.6 | 3.3 | 84.6 | 4.6 | 4.9 | 5.9 | |
| 8720.12.3.1.34 | | | | | | | | | |
| AFS | 3 | 19.2 | 2.9 | 2.7 | 84.3 | 5.0 | 5.2 | 5.5 | |
| 8720.12.3.1.25 | | | | | | | | | |
| Trans Avg. | | 21.6 | 2.9 | 3.0 | 84.4 | 4.9 | 4.9 | 5.9 | |
| AFS | 0 | 24.0 | 11.5 | 4.1 | 19.7 | 52.3 | 12.3 | 15.6 | 1 |
| 8720.12.3.1.9 | | | | | | | | | |
| AFS | 0 | 21.4 | 10.8 | 3.8 | 17.1 | 55.1 | 13.2 | 14.6 | 1 |
| 8720.12.3.1.16 | | | | | | | | | |
| AFS | 0 | 20.8 | 10.9 | 4.1 | 16.6 | 56.0 | 12.5 | 14.9 | 1 |
| 8720.12.3.1.17 | | | | | | | | | |
| AFS | 0 | 21.0 | 11.3 | 3.6 | 16.0 | 55.5 | 13.6 | 14.9 | 1 |
| 8720.12.3.1.23 | | | | | | | | | |
| AFS | 0 | 20.5 | 11.1 | 4.1 | 22.1 | 50.5 | 12.3 | 15.2 | 1 |
| 8720.12.3.1.12 | | | | | | | | | |
| AFS | 0 | 20.5 | 11.5 | 3.6 | 17.2 | 55.1 | 12.6 | 15.1 | |
| 8720.12.3.1.31 | | | | | | | | | |
| AFS | 0 | 20.4 | 11.6 | 4.4 | 14.8 | 55.5 | 13.7 | 16.0 | |
| 8720.12.3.1.14 | | | | | | | | | |
| AFS | 0 | 20.3 | 11.2 | 4.4 | 12.9 | 53.0 | 18.5 | 15.5 | |
| 8720.12.3.1.1 | | | | | | | | | |
| AFS | 0 | 19.5 | 9.9 | 3.6 | 15.7 | 55.8 | 15.0 | 13.5 | |
| 8720.12.3.1.20 | | | | | | | | | |
| AFS | 0 | 19.3 | 11.6 | 3.8 | 14.7 | 55.2 | 14.7 | 15.4 | |
| 8720.12.3.1.30 | | | | | | | | | |
| AFS | 0 | 18.0 | 12.3 | 3.6 | 13.6 | 52.2 | 18.3 | 15.8 | |
| 8720.12.3.1.22 | | | | | | | | | |
| Null Avg. | | 20.5 | 11.2 | 3.9 | 16.4 | 54.2 | 14.2 | 15.2 | |

TABLE 10
Fatty acid composition, sugar readout and oil content of T1 Seed from
experiment Soil43.

| | | | | | | | | | Chosen |
|---|---|---|---|---|---|---|---|---|---|
| | | | | | | | | Total | for |
| T1 Seed | TLC | % Oil | 16:0% | 18:0% | 18:1% | 18:2% | 18:3% | Sats | Comp |
| AFS8738.11.2.4.14 | 3 | 25.2 | 2.4 | 4.0 | 85.9 | 4.0 | 3.7 | 6.4 | 1 |
| AFS8738.11.2.4.36 | 3 | 23.9 | 2.3 | 3.3 | 86.9 | 3.6 | 3.9 | 5.6 | 1 |
| AFS8738.11.2.4.23 | 3 | 24.1 | 2.3 | 2.8 | 85.0 | 4.3 | 5.6 | 5.1 | 1 |
| AFS8738.11.2.4.5 | 3 | 22.2 | 2.5 | 3.7 | 86.0 | 3.6 | 4.3 | 6.2 | 1 |
| AFS8738.11.2.4.26 | 3 | 22.2 | 3.2 | 3.4 | 80.2 | 7.5 | 5.7 | 6.6 | 1 |
| AFS8738.11.2.4.28 | 3 | 22.3 | 2.2 | 2.9 | 87.5 | 3.4 | 4.0 | 5.1 | |
| AFS8738.11.2.4.18 | 3 | 22.2 | 2.6 | 3.0 | 85.6 | 3.8 | 5.0 | 5.6 | |
| AFS8738.11.2.4.4 | 3 | 22.1 | 2.4 | 2.8 | 86.9 | 3.1 | 4.8 | 5.2 | |
| AFS8738.11.2.4.8 | 3 | 22.0 | 1.8 | 2.4 | 89.3 | 2.8 | 3.7 | 4.2 | |
| AFS8738.11.2.4.24 | 3 | 21.9 | 2.4 | 2.9 | 86.7 | 3.3 | 4.7 | 5.3 | |
| AFS8738.11.2.4.30 | 3 | 21.8 | 2.7 | 3.3 | 86.0 | 3.9 | 4.1 | 6.0 | |
| AFS8738.11.2.4.22 | 3 | 21.7 | 2.5 | 2.8 | 86.9 | 3.6 | 4.2 | 5.3 | |
| AFS8738.11.2.4.2 | 3 | 21.7 | 2.7 | 3.0 | 86.2 | 3.6 | 4.5 | 5.7 | |
| AFS8738.11.2.4.33 | 3 | 21.6 | 2.6 | 2.9 | 85.7 | 4.7 | 4.0 | 5.5 | |
| AFS8738.11.2.4.17 | 3 | 21.2 | 3.1 | 3.1 | 80.7 | 7.5 | 5.6 | 6.2 | |
| AFS8738.11.2.4.6 | 3 | 21.1 | 2.5 | 2.6 | 86.2 | 3.5 | 5.1 | 5.1 | |
| AFS8738.11.2.4.15 | 3 | 21.0 | 2.7 | 2.9 | 84.3 | 4.6 | 5.4 | 5.7 | |
| AFS8738.11.2.4.12 | 3 | 21.0 | 2.6 | 2.6 | 86.5 | 3.6 | 4.8 | 5.2 | |
| AFS8738.11.2.4.7 | 3 | 20.9 | 2.5 | 2.7 | 85.2 | 3.9 | 5.7 | 5.1 | |
| AFS8738.11.2.4.21 | 3 | 20.6 | 2.6 | 2.9 | 85.1 | 4.0 | 5.3 | 5.5 | |
| AFS8738.11.2.4.9 | 3 | 20.6 | 2.8 | 2.7 | 85.6 | 4.0 | 4.9 | 5.5 | |
| AFS8738.11.2.4.34 | 3 | 20.5 | 2.5 | 3.3 | 85.2 | 4.1 | 4.9 | 5.8 | |
| AFS8738.11.2.4.20 | 3 | 20.5 | 2.4 | 2.9 | 86.6 | 4.5 | 3.6 | 5.3 | |
| AFS8738.11.2.4.27 | 3 | 20.5 | 2.6 | 3.1 | 84.6 | 4.7 | 5.0 | 5.7 | |
| AFS8738.11.2.4.29 | 3 | 20.3 | 2.6 | 2.7 | 86.2 | 3.5 | 5.0 | 5.3 | |
| AFS8738.11.2.4.13 | 3 | 20.1 | 2.0 | 2.3 | 89.8 | 2.5 | 3.5 | 4.3 | |
| AFS8738.11.2.4.35 | 3 | 18.7 | 2.5 | 3.6 | 85.4 | 4.3 | 4.2 | 6.1 | |
| AFS8738.11.2.4.10 | 3 | 18.6 | 1.9 | 2.3 | 89.1 | 2.8 | 3.9 | 4.3 | |
| AFS8738.11.2.4.11 | 3 | 18.5 | 1.8 | 2.2 | 88.3 | 3.3 | 4.3 | 4.1 | |
| Trans | | 21.3 | 2.5 | 2.9 | 86.0 | 4.0 | 4.6 | 5.4 | |
| Avg. | | | | | | | | | |
| AFS8738.11.2.4.32 | 0 | 21.9 | 11.3 | 4.0 | 16.7 | 53.2 | 14.8 | 15.3 | 1 |
| AFS8738.11.2.4.31 | 0 | 20.6 | 10.8 | 3.8 | 22.2 | 50.1 | 13.2 | 14.6 | 1 |
| AFS8738.11.2.4.25 | 0 | 19.6 | 12.1 | 3.8 | 17.1 | 52.1 | 14.9 | 15.9 | 1 |
| AFS8738.11.2.4.19 | 1 | 19.0 | 11.1 | 3.6 | 18.1 | 53.2 | 13.9 | 14.7 | 1 |
| AFS8738.11.2.4.16 | 0 | 18.6 | 10.9 | 3.8 | 19.6 | 50.7 | 15.0 | 14.7 | 1 |
| Null Avg. | | 19.9 | 11.2 | 3.8 | 18.7 | 51.9 | 14.3 | 15.0 | |

[0495] From Tables 9 and 10, it can be seen that transgenic seed have higher oil contents than null seed and also having higher oleic acid, lower saturated fatty acids and lower alpha-linolenic contents compared to null seed. Also, transgenic seed show decreased raffinosaccharides and increased sucrose by TLC compared to null seed.

[0496] Additionally, it can be seen that all events segregate for phenotype (TLC result and fatty acid profile changes) in a 3:1 Mendelian fashion.

[0497] A summary of the average values for oil content and fatty acid profile for T1 seed from each event from Soil42 and Soil43, along with the difference in oil content for each event is shown in Table 11. In Table 11, the percent change of transgenic compared to null is indicated as % Change.

TABLE 11
Average oil contents and fatty acid profiles for T1 seed from RMCE events from Soil42 and Soil43.

| | | T0 | T1 | | | | | | | Total |
|---|---|---|---|---|---|---|---|---|---|---|
| Experiment | Event | Plant | Seed | % Oil | 16:0% | 18:0% | 18:1% | 18:2% | 18:3% | Sats |
| Soil42 | AFS | AFS | Trans Avg. | 21.8 | 3.2 | 3.3 | 80.4 | 6.9 | 6.2 | 6.5 |
| | 8720-8-6 | 8720.8.6.3 | | | | | | | | |
| Soil42 | AFS | AFS | Null Avg. | 20.7 | 11.3 | 4.1 | 17.1 | 53.0 | 14.6 | 15.4 |
| | 8720-8-6 | 8720.8.6.3 | | | | | | | | |
| | | | % Change | 5 | −71 | −21 | 370 | −87 | −58 | −58 |
| Soil42 | AFS | AFS | Trans Avg. | 21.6 | 2.9 | 3.0 | 84.4 | 4.9 | 4.9 | 5.9 |
| | 8720-12-3 | 8720.12.3.1 | | | | | | | | |
| Soil42 | AFS | AFS | Null Avg. | 20.5 | 11.2 | 3.9 | 16.4 | 54.2 | 14.2 | 15.2 |
| | 8720-12-3 | 8720.12.3.1 | | | | | | | | |
| | | | % Change | 5 | −74 | −24 | 414 | −91 | −66 | −61 |
| Soil43 | AFS | AFS | Trans Avg. | 21.3 | 2.5 | 2.9 | 86.0 | 4.0 | 4.6 | 5.4 |
| | 8738-11-2 | 8738.11.2.4 | | | | | | | | |
| Soil43 | AFS | AFS | Null Avg. | 19.9 | 11.2 | 3.8 | 18.7 | 51.9 | 14.3 | 15.0 |
| | 8738-11-2 | 8738.11.2.4 | | | | | | | | |
| | | | % Change | 7 | −78 | −23 | 359 | −92 | −68 | −64 |

[0498] In Table 11, average oil content percent increases comparing all transgenic seed to null segregant T1 seed range from 5 to 7% over null. Palmitic acid average percent decrease ranges from 71 to 78%. Stearic acid average percent decrease ranges from 21 to 24%. Total saturated fatty acid average percent decrease ranges from 58 to 64%. Oleic acid average percent increase ranges from 359 to 414%. Linoleic acid average percent decrease ranges from 87 to 92%. Alpha-linolenic acid average percent decrease ranges from 58 to 68%.

Compositional Analysis of T1 Seed from Soil42 and Soil43 Events

[0499] Five individual transgenic and corresponding null T1 seed from Soil42 events and Soil43 events (indicated in Tables 9 and 10 as Chosen for comp) were each ground to a powder using the genogrinder as described herein.

[0500] Non-structural soluble carbohydrate and protein from the chosen Soil42 and Soil43 T1 seed transgenic and null powders were quantified using the methods described in Example 2 and oil content of powders was determined by NMR as described herein and results are presented in Table 12. Total lipids extracted from dry powders using heptane extraction were analyzed for fatty acid composition by derivatization with TMSH and GC-FAME as described herein is also presented for each seed in Table 12.

[0501] In Table 12, individual soluble carbohydrates (pinitol, sorbitol, fructose, glucose, sucrose, galactinol, raffinose, stachyose) as well as protein and oil are for individual seed are reported as a percent of ground soy powder. Also presented are the total rafinosaccharides (Total Rafs; sum of raffinose and stachyose) and total soluble carbohydrates (Total Carbs; sum of individual carbohydrates).

[0502] In Table 12, the average value for all transgenic seed or null seed for each individual event is shown (Avg.).

TABLE 12
Soluble carbohydrate, protein and oil content of individual
seed from null and transgenic Soil42 event and Soil43 events.

| | T1 | Pini- | Sorbi- | Fruc- | Glu- | Su- | Galac- | Raffi- | Stach- | Total | Total | Pro- | |
|---|---|---|---|---|---|---|---|---|---|---|---|---|---|
| Exp | Seed ¹ | tol | tol | tose | cose | crose | tinol | nose | yose | Rafs | Carbs | tein | Oil |
| Soil42 | 3 | 0.00 | 0.02 | 0.13 | 0.02 | 7.43 | 0.18 | 0.44 | 0.00 | 0.44 | 8.21 | 37.0 | 23.2 |
| Soil42 | 15 | 0.00 | 0.02 | 0.04 | 0.04 | 6.82 | 0.03 | 0.75 | 0.31 | 1.07 | 8.02 | 38.9 | 22.4 |
| Soil42 | 5 | 0.00 | 0.00 | 0.04 | 0.00 | 5.17 | 0.21 | 0.46 | 0.00 | 0.46 | 5.88 | 35.9 | 23.1 |
| Soil42 | 34 | 0.00 | 0.02 | 0.05 | 0.05 | 7.10 | 0.03 | 0.72 | 0.33 | 1.04 | 8.28 | 37.1 | 23.9 |
| Soil42 | 14 | 0.00 | 0.00 | 0.04 | 0.04 | 7.15 | 0.02 | 0.62 | 0.30 | 0.92 | 8.17 | 39.5 | 22.8 |
| | Trans. Avg | 0.00 | 0.01 | 0.06 | 0.03 | 6.73 | 0.09 | 0.60 | 0.19 | 0.79 | 7.71 | 37.7 | 23.1 |
| Soil42 | 10 | 0.00 | 0.01 | 0.04 | 0.04 | 6.37 | 0.02 | 0.93 | 2.49 | 3.42 | 9.90 | 37.4 | 19.3 |
| Soil42 | 25 | 0.00 | 0.02 | 0.05 | 0.04 | 6.70 | 0.02 | 0.85 | 2.21 | 3.06 | 9.89 | 36.1 | 20.2 |
| Soil42 | 35 | 0.00 | 0.02 | 0.05 | 0.05 | 7.05 | 0.03 | 1.12 | 2.80 | 3.91 | 11.1 | 35.7 | 19.0 |
| Soil42 | 6 | 0.00 | 0.02 | 0.04 | 0.03 | 6.16 | 0.02 | 0.91 | 2.79 | 3.70 | 9.96 | 37.9 | 20.4 |
| Soil42 | 22 | 0.00 | 0.02 | 0.04 | 0.04 | 5.82 | 0.03 | 1.08 | 2.80 | 3.87 | 9.82 | 39.6 | 22.3 |
| | Null Avg | 0.00 | 0.02 | 0.04 | 0.04 | 6.42 | 0.02 | 0.98 | 2.62 | 3.59 | 10.1 | 37.3 | 20.2 |
| Soil42 | 24 | 0.00 | 0.02 | 0.05 | 0.04 | 7.84 | 0.02 | 0.87 | 0.43 | 1.30 | 9.26 | 37.1 | 22.3 |
| Soil42 | 3 | 0.00 | 0.02 | 0.03 | 0.04 | 7.37 | 0.02 | 0.72 | 0.41 | 1.13 | 8.61 | 33.8 | 23.5 |
| Soil42 | 19 | 0.00 | 0.02 | 0.06 | 0.05 | 9.01 | 0.02 | 0.73 | 0.35 | 1.08 | 10.2 | 38.9 | 21.9 |
| Soil42 | 15 | 0.00 | 0.03 | 0.04 | 0.05 | 8.60 | 0.02 | 1.22 | 0.44 | 1.66 | 10.4 | 34.2 | 21.7 |
| Soil42 | 28 | 0.00 | 0.02 | 0.08 | 0.06 | 8.71 | 0.18 | 0.81 | 0.36 | 1.16 | 10.2 | 37.6 | 22.0 |
| | Trans. Avg. | 0.00 | 0.02 | 0.05 | 0.05 | 8.31 | 0.05 | 0.87 | 0.40 | 1.27 | 9.74 | 36.3 | 22.3 |
| Soil42 | 12 | 0.00 | 0.02 | 0.03 | 0.02 | 5.13 | 0.02 | 0.89 | 3.34 | 4.24 | 9.47 | 37.3 | 19.6 |
| Soil42 | 9 | 0.00 | 0.02 | 0.03 | 0.03 | 6.05 | 0.06 | 0.58 | 3.53 | 4.11 | 10.3 | 32.0 | 22.8 |
| Soil42 | 16 | 0.00 | 0.02 | 0.03 | 0.03 | 4.77 | 0.06 | 0.52 | 2.69 | 3.21 | 8.11 | 36.2 | 20.6 |
| Soil42 | 17 | 0.00 | 0.03 | 0.05 | 0.04 | 7.89 | 0.02 | 1.27 | 2.47 | 3.74 | 11.8 | 36.3 | 20.1 |
| Soil42 | 23 | 0.00 | 0.03 | 0.06 | 0.04 | 8.11 | 0.03 | 1.33 | 2.84 | 4.17 | 12.4 | 33.3 | 20.4 |
| | Null Avg. | 0.00 | 0.02 | 0.04 | 0.03 | 6.39 | 0.04 | 0.92 | 2.97 | 3.89 | 10.4 | 35.0 | 20.7 |
| Soil43 | 36 | 0.02 | 0.03 | 0.14 | 0.18 | 6.99 | 0.03 | 0.90 | 1.19 | 2.10 | 9.49 | 35.3 | 23.0 |
| Soil43 | 5 | 0.02 | 0.02 | 0.15 | 0.19 | 7.99 | 0.02 | 0.68 | 0.64 | 1.32 | 9.71 | 38.4 | 20.4 |
| Soil43 | 14 | 0.02 | 0.02 | 0.13 | 0.20 | 7.55 | 0.04 | 0.77 | 0.79 | 1.56 | 9.51 | 31.3 | 24.1 |
| Soil43 | 23 | 0.02 | 0.02 | 0.12 | 0.17 | 6.68 | 0.02 | 0.74 | 0.72 | 1.46 | 8.50 | 33.5 | 22.2 |
| Soil43 | 26 | 0.02 | 0.02 | 0.14 | 0.18 | 7.52 | 0.02 | 0.63 | 0.64 | 1.27 | 9.18 | 36.3 | 21.4 |
| | Trans. Avg. | 0.02 | 0.02 | 0.14 | 0.18 | 7.34 | 0.03 | 0.74 | 0.80 | 1.54 | 9.28 | 35.0 | 22.2 |
| Soil43 | 31 | 0.02 | 0.02 | 0.14 | 0.15 | 6.45 | 0.04 | 1.15 | 2.66 | 3.80 | 10.6 | 35.4 | 19.8 |
| Soil43 | 16 | 0.02 | 0.02 | 0.13 | 0.15 | 6.05 | 0.04 | 0.77 | 3.06 | 3.84 | 10.2 | 34.9 | 17.6 |
| Soil43 | 19 | 0.02 | 0.02 | 0.15 | 0.15 | 6.72 | 0.03 | 1.27 | 2.54 | 3.82 | 10.9 | 35.8 | 18.1 |
| Soil43 | 25 | 0.02 | 0.02 | 0.13 | 0.14 | 5.54 | 0.04 | 0.80 | 3.20 | 3.99 | 9.88 | 36.3 | 19.2 |
| Soil43 | 32 | 0.02 | 0.02 | 0.11 | 0.12 | 4.95 | 0.03 | 0.54 | 3.02 | 3.57 | 8.82 | 35.1 | 21.0 |
| | Null Avg. | 0.02 | 0.02 | 0.13 | 0.14 | 5.94 | 0.03 | 0.91 | 2.90 | 3.80 | 10.1 | 35.5 | 19.1 |

¹ For experiment Soil42 (AFS8720.8.6) seeds come from T0 plants AFS 8720.8.6.3 (numerical rows 1-12) or from T0 Plants AFS 8720.12.3.1 (numerical rows 13-24. For experiment Soil43 (AFS 8738.11.2) seeds come from T0 plants AFS 8738.11.2.4.

[0503] The average values for all transgenic seed or null seed (Avg.) for individual soluble carbohydrates (pinitol, sorbitol, fructose, glucose, sucrose, galactinol, raffinose, stachyose) as well as protein and oil are summarized in Table 13. Also presented are the average values for total rafinosaccharides (Total Rafs; sum of raffinose and stachyose) and total soluble carbohydrates (Total Carbs; sum of individual carbohydrates).

[0504] Additionally, the percent increase or decrease (percent change) for the average of any particular soluble carbohydrate, protein or oil as is also shown in Table 13 where the percent is calculated in the following way; [(transgenic value-null value)/null value×100%].

TABLE 13
Average soluble carbohydrate, protein and oil content of individual
seed from null and transgenic Soil42 event and Soil43 events.

| | | Pini- | Sorbi- | Fruc- | Glu- | Su- | Galac- | Raffi- | Stach- | Total | Total | Pro- | |
|---|---|---|---|---|---|---|---|---|---|---|---|---|---|
| Exp | Sample | tol | tol | tose | cose | crose | tinol | nose | yose | Rafs | Carbs | tein | Oil |
| Soil42 | Trans. Avg. | 0.00 | 0.01 | 0.06 | 0.03 | 6.73 | 0.09 | 0.60 | 0.19 | 0.79 | 7.71 | 37.7 | 23.1 |
| Soil42 | Null Avg. | 0.00 | 0.02 | 0.04 | 0.04 | 6.42 | 0.02 | 0.98 | 2.62 | 3.59 | 10.14 | 37.3 | 20.2 |
| | % change | | −38 | 35 | −24 | 5 | 277 | −39 | −93 | −78 | −24 | 1 | 14 |
| Soil42 | Trans. Avg. | 0.00 | 0.02 | 0.05 | 0.05 | 8.31 | 0.05 | 0.87 | 0.40 | 1.27 | 9.74 | 36.3 | 22.3 |
| Soil42 | Null Avg. | 0.00 | 0.02 | 0.04 | 0.03 | 6.39 | 0.04 | 0.92 | 2.97 | 3.89 | 10.41 | 35.0 | 20.7 |
| | % change | | −13 | 32 | 45 | 30 | 43 | −5 | −87 | −67 | −6 | 4 | 8 |
| Soil43 | Trans. Avg. | 0.02 | 0.02 | 0.14 | 0.18 | 7.34 | 0.03 | 0.74 | 0.80 | 1.54 | 9.28 | 35.0 | 22.2 |
| Soil43 | Null Avg. | 0.02 | 0.02 | 0.13 | 0.14 | 5.94 | 0.03 | 0.91 | 2.90 | 3.80 | 10.10 | 35.5 | 19.1 |
| | % change | 10 | 6 | 3 | 27 | 24 | −20 | −18 | −72 | −60 | −8 | −2 | 16 |

¹ For experiment Soil42 (AFS8720.8.6) and T0 plants AFS 8720.8.6.3 results are shown in first three numerical rows or in numerical rows 4-6 for Soil42 (AFS 8720.12.3) and T0 plants AFS 8720.12.3.1. Results for Soil43 are from event AFS 8738.11.2 and T0 plants AFS 8738.11.2.4.

[0505] In Table 13, the average oil content percent increase for transgenic T1 Soil42 seed ranges from 8 to 14% over null. Protein increase ranges from 1 to 4%. Sucrose average percent increase ranges from 5 to 30%. Total raffinosaccharide average percent decrease ranges from 67 to 78%. Total carbohydrate average percent decrease ranges from 6 to 24%.

[0506] In Table 13, the average oil content percent increase for transgenic T1 Soil43 seed is 16% over null. Protein is slightly decreased by 2%. Sucrose average percent increase ranges is 24%. Total raffinosaccharide average percent decrease is 60%. Total carbohydrate average percent decrease is 8%.

[0507] A soybean meal can be generated by one skilled in the art and the resulting protein and soluble carbohydrate compositions can be calculated for the resulting soybean meal using the composition obtained for the seed as described above. Given the average oil, protein and total soluble carbohydrate compositions shown in Table 13, the resulting average protein and soluble carbohydrate compositions can be calculated for a soybean meal, as described above, and these are shown in Table 14.

TABLE 14
Soluble carbohydrate and protein of soybean meal generated from null and transgenic Soil42 event and Soil43 events.

| | T0 | | Pini- | Sorbi- | Fruc- | Glu- | Su- | Galac- | Raffi- | Stach- | Total | Total | Pro- |
|---|---|---|---|---|---|---|---|---|---|---|---|---|---|
| Exp | Plant | Sample | tol | tol | tose | cose | crose | tinol | nose | yose | Rafs | Carbs | tein |
| Soil42 | 8720.8.6.3 | Trans. Avg. | 0.0 | 0.0 | 0.1 | 0.0 | 8.8 | 0.1 | 0.8 | 0.2 | 1.0 | 10.0 | 49.0 |
| Soil42 | 8720.8.6.3 | Null Avg. | 0.0 | 0.0 | 0.1 | 0.1 | 8.0 | 0.0 | 1.2 | 3.3 | 4.5 | 12.7 | 46.7 |
| | | Change | | −48 | 56 | −22 | 9 | 367 | −36 | −92 | −77 | −21 | 5 |
| Soil42 | 8720.12.3.1 | Trans. Avg. | 0.0 | 0.0 | 0.1 | 0.1 | 10.7 | 0.1 | 1.1 | 0.5 | 1.6 | 12.5 | 46.7 |
| Soil42 | 8720.12.3.1 | Null Avg. | 0.0 | 0.0 | 0.1 | 0.0 | 8.1 | 0.1 | 1.2 | 3.7 | 4.9 | 13.1 | 44.1 |
| | | % Change | | 2 | 28 | 70 | 33 | 28 | −3 | −86 | −67 | −5 | 6 |
| Soil43 | 8738.11.2.4 | Trans. Avg. | 0.0 | 0.0 | 0.2 | 0.2 | 9.4 | 0.0 | 1.0 | 1.0 | 2.0 | 11.9 | 45.0 |
| Soil43 | 8738.11.2.4 | Null Avg. | 0.0 | 0.0 | 0.2 | 0.2 | 7.3 | 0.0 | 1.1 | 3.6 | 4.7 | 12.5 | 43.9 |
| | | % Change | | 4 | 12 | 34 | 28 | 4 | −15 | −71 | −58 | −4 | 3 |

[0508] In Table 14, the average protein content percent increase for transgenic Soil42 soybean meal ranges from 5 to 6% over null. Sucrose average percent increase ranges from 9 to 33%. Total raffinosaccharide average percent decrease ranges from 67 to 77%. Total carbohydrate average percent decrease ranges from 5 to 21%.

[0509] In Table 14, the average protein content percent increase for transgenic Soil43 soybean meal is 3% over null. Sucrose average percent increase is 28%. Total raffinosaccharide average percent decrease is 71%. Total carbohydrate average percent decrease is 58%.

### Example 9

### Genetic Stacking of High Oleic and High Oil/High Protein Traits in Soybean

[0510] Soybean plants homozygous for the transgene of high oleic soybean event DP-305423-1 described in PCT Int. Appl. WO 2008054747 A2 which is fully incorporated by reference, was crossed with soybean plants homozygous for the transgene insertion of event AFS 4818.1.2 described in U.S. Pat. No. 8,143,476, issued Mar. 27, 2014 which is fully incorporated by reference. Briefly, emasculated flowers of AFS 4818.1.2 (comprising YL DGAT 1 and YL DGAT2) were fertilized with pollen of plants homozygous for the transgene of soybean event DP-305423-1. The resulting F1 seeds were planted and F1 plants were allowed to self-fertilize. After additional rounds of selfing of F2 and F3 plants F4 plant lines were identified that were homozygous for the HO and YL_DGAT transgenes. F5 seeds of these double homozygous plant lines were uniformly high oleic (oleic acid content >75%), uniformly reduced palmitic acid content (<5% of total fatty acids, when combined with the DP-305423-1 HO genetic background) and also exhibited the increased oil content (increase of oil seed oil content of ≧10% compared to seeds of null segregant lines gown alongside the F5 plants) associated with the YL_DGAT transgene. F5 seeds of the DP-305423-1 AFS 4818.1.2 cross were planted in double 15 ft yield trial rows comprised of 250 seeds. These rows were planted alongside T9 seed of DP-305423-1 and untransformed soybeans of the Jack genotype planted in identical fashion. At the end of the 2010 growing season composition of mature seed was analyzed by non-destructive bulk near infrared transmission spectroscopy.

### NIT Measurements, Data Analysis, and Model Development

[0511] NIR Spectra, from 850-1050 nm (2-nm step; 30-mm path length), for 400-500 g bulk samples of intact soybeans were acquired in transmission mode using a Foss Tecator AB model 1241 grain analyzer (Hoganas, Sweden) fitted with a standard instrument hopper and sample transport mechanism. Each batch was analyzed in duplicate using 10 subsample scans, which were saved as the average.

[0512] All data analysis was performed using the InfraSoft International (ISI) chemometrics software WinISI II v.1.50e (NIRSystems Inc., Silver Spring, Md., USA). Pre-treatment of the raw NIR (log 1/T) spectral data included multiplicative scatter correction and first derivative transformation over a 4-point (8-nm) gap using a 4-point smoothing function. Predictions of oil and protein content (corrected to a 13% moisture basis) were based on calibration models developed by USDA-FGIS\GIPSA. Calibration models for oleic and linolenic acid were proprietary and were developed in-house using Partial Least-Squares (PLS) regression (Williams and Norris, 1987) utilizing the transformed spectrum captured from material presenting a wide compositional diversity for these two components. The reference chemistry used for the calibrations was developed by gas chromatographic analysis of fatty acid methyl esters of oil extracts derived from the bean samples, after spectral capture. All calibration development work was performed using standardized PLS algorithms within the Win ISI II v.1.50e software. The optimum number of PLS factors was defined as that number of factors beyond which no further improvement in the Standard Error of Cross-Validation (SECV) was observed. Calculation of the SECV was handled automatically by the WinISI software. The SECV was obtained by sequentially removing subsets of samples from the calibration set, re-deriving the model and predicting the removed samples in an iterative manner. Six separate cross-validation tests provided the most reliable estimate of calibration accuracy obtainable from the sample set in question. The coefficient of determination (R²), was used to describe the correlation between reference (observed) and NIR-predicted values for the calibration set. The Relative Predictive Determinant (RPD), defined as the ratio of the SD of the reference values to the SECV, was used as a normalized indicator for comparing NIR models where values >2.0 are generally recognized as sufficient for quantitative measurement (Chang et al., 2001).

[0513] Fatty acid composition was also determined by GC analysis as described in Example 6. Table 15 demonstrates that crossing of HO and YL_DGAT soybean events allows one to effectively combine seed compositional traits comprised of increased oleic acid (at the expense of saturated and polyunsaturated seed fatty acids) and increased oil and protein content.

[0514] In Table 15, percent oil, percent protein and percent oil+protein values, as determined by NIT, are expressed as percent of seed weight. The percent fatty acids, as determined by GC-FAME analysis of oil, are expressed as weight percent of total fatty acids.

[0515] Additionally, the percent increase or decrease (percent change) for the average fatty acid composition, protein, oil or protein+oil for the F6 (Jack, DP-305423-1×Jack AFS 4818.1.2) seed compared to Jack is also shown in Table 15 where the percent is calculated in the following way; [(transgenic value-null value)/null value×100%].

TABLE 15
Seed composition of unmodified soybeans, soybeans of high oleic event DP-
305423-1, and F6 seed of a cross between DP-305423-1 and AFS 4818.1.2

| | Row | % | % | % oil + | % | % | % | % | % |
|---|---|---|---|---|---|---|---|---|---|
| Genotype | number | oil | protein | protein | palmitic | stearic | oleic | linoleic | linolenic |
| Jack | 1 | 17.7 | 35.2 | 52.9 | 9.7 | 4 | 19.4 | 58.9 | 8 |
| Jack | 2 | 17.8 | 35.5 | 53.2 | 9.7 | 4 | 21.7 | 56.9 | 7.7 |
| Jack | 3 | 17.5 | 36 | 53.5 | 9.8 | 4 | 21.1 | 57.5 | 7.7 |
| Jack | 4 | 17.6 | 35.9 | 53.5 | 9.6 | 4.1 | 20.7 | 58 | 7.6 |
| Jack | 5 | 18 | 35.4 | 53.4 | 10 | 3.9 | 20.4 | 58 | 7.8 |
| Jack | 6 | 17.6 | 35.3 | 52.9 | 9.7 | 4 | 20.6 | 57.7 | 8 |
| Jack | 7 | 17.8 | 35.2 | 53 | 9.8 | 4 | 20 | 58.4 | 7.8 |
| Jack | 8 | 18.6 | 34.8 | 53.3 | 9.7 | 4.6 | 22.1 | 56.3 | 7.4 |
| Jack | 9 | 17.7 | 35.5 | 53.2 | 9.5 | 5 | 25.1 | 53.9 | 6.4 |
| Jack | 10 | 17.7 | 36.1 | 53.8 | 9.9 | 4 | 19 | 59 | 8.1 |
| Jack | 11 | 18.3 | 34.5 | 52.8 | 9.7 | 3.7 | 21.8 | 57.8 | 7.1 |
| Jack | 12 | 18.6 | 34.6 | 53.2 | 10 | 3.6 | 19.5 | 59.7 | 7.2 |
| Jack | 13 | 18.5 | 34.4 | 52.9 | 9.6 | 3.5 | 18.8 | 60.9 | 7.4 |
| Jack | 14 | 18.5 | 35 | 53.6 | 9.9 | 4.1 | 20.8 | 57.8 | 7.5 |
| Jack | 15 | 18.6 | 34.4 | 53 | 9.8 | 3.9 | 20.8 | 57.9 | 7.6 |
| Jack | 16 | 18.5 | 34.3 | 52.8 | 9.6 | 4 | 19.7 | 59.1 | 7.7 |
| Jack | 17 | 18.1 | 34 | 52.2 | 9.8 | 4.8 | 24.5 | 54.2 | 6.6 |
| Jack | 18 | 18.7 | 33.7 | 52.4 | 9.8 | 4.5 | 24.2 | 54.6 | 6.9 |
| Jack | 19 | 17.9 | 35.8 | 53.7 | 9.7 | 4.2 | 21 | 57.6 | 7.5 |
| Jack | | 18.1 | 35 | 53.1 | 9.7 | 4.1 | 21.1 | 57.6 | 7.5 |
| (average) | | | | | | | | | |
| Jack, DP- | 1 | 17.1 | 36.9 | 54 | 6.1 | 3.5 | 85.6 | 1.8 | 3.2 |
| 305423-1, T10 | | | | | | | | | |
| Jack, DP- | 2 | 17 | 36.9 | 53.9 | 6.4 | 3.7 | 84.5 | 1.6 | 3.8 |
| 305423-1, T10 | | | | | | | | | |
| Jack, DP- | 3 | 17.1 | 37.1 | 54.2 | 6 | 4.1 | 83.5 | 2.3 | 4.2 |
| 305423-1, T10 | | | | | | | | | |
| Jack, DP- | 4 | 18 | 35.1 | 53 | 6.1 | 4.5 | 83.9 | 2 | 3.5 |
| 305423-1, T10 | | | | | | | | | |
| Jack, DP- | 5 | 17.3 | 37.2 | 54.5 | 6.2 | 3.9 | 84.6 | 1.8 | 3.6 |
| 305423-1, T10 | | | | | | | | | |
| Jack, DP- | 6 | 18.2 | 35.4 | 53.6 | 6 | 4.5 | 84.4 | 1.6 | 3.4 |
| 305423-1, T10 | | | | | | | | | |
| Jack, DP- | 7 | 17.2 | 37 | 54.2 | 6.3 | 3.7 | 84.8 | 1.6 | 3.7 |
| 305423-1, T10 | | | | | | | | | |
| Jack, DP- | | 17.4 | 36.5 | 53.9 | 6.1 | 4 | 84.4 | 1.8 | 3.6 |
| 305423-1, T10 | | | | | | | | | |
| (average) | | | | | | | | | |
| Jack, DP- | 1 | 20.4 | 38.9 | 59.3 | 4.6 | 5.6 | 82.8 | 3.6 | 3.4 |
| 305423-1 × | | | | | | | | | |
| Jack AFS | | | | | | | | | |
| 4818.1.2, F6 | | | | | | | | | |
| Jack, DP- | 2 | 21.4 | 36.9 | 58.2 | 4.1 | 5.1 | 85 | 2.9 | 2.9 |
| 305423-1 × | | | | | | | | | |
| Jack AFS | | | | | | | | | |
| 4818.1.2, F6 | | | | | | | | | |
| Jack, DP- | 3 | 21.7 | 37.1 | 58.8 | 3.8 | 5.1 | 85.7 | 2.5 | 2.9 |
| 305423-1 × | | | | | | | | | |
| Jack AFS | | | | | | | | | |
| 4818.1.2, F6 | | | | | | | | | |
| Jack, DP- | | 21.1 | 37.6 | 58.8 | 4.1 | 5.3 | 84.5 | 3 | 3 |
| 305423-1 × | | | | | | | | | |
| Jack AFS | | | | | | | | | |
| 4818.1.2, F6 | | | | | | | | | |
| (average) | | | | | | | | | |
| % Change | | 17 | 7 | 11 | −58 | 29 | 300 | −95 | −60 |

[0516] In Table 15, the average oil content of F6 (Jack, DP-305423-1×Jack AFS 4818.1.2) seed increases by 17% over Jack. The average protein content increases by 7% and the average oil+protein increases by 11%. Average palmitic acid decreases by 58%. Average stearic acid increases by 29%. Average oleic acid increases by 300%. Average linoleic acid decreases by 95%. Average alpha-linolenic acid decreases by 60%. Total saturated fatty acids percent decrease ranges from 0 to 11%.

[0517] A soybean meal can be generated by one skilled in the art and the resulting protein content can be calculated for the resulting soybean meal using the composition obtained for the seed as described above. Given the average oil and protein shown in Table 15, the resulting average protein content can be calculated for a soybean meal, as described above, and this is shown in Table 16.

TABLE 16
Protein content soybean meal generated from unmodified
soybeans, soybeans of high oleic event DP-305423-1, and
F6 seed of a cross between DP-305423-1 and AFS 4818.1.2

| Genotype | % protein |
|---|---|
| Jack (average) | 42.7 |
| Jack, DP-305423-1, T10 (average) | 44.2 |
| Jack, DP-305423-1 × Jack AFS 4818.1.2, | 47.7 |
| F6 (average) | |
| % Change | 12% |

[0518] In Table 16, the average protein content of F6 (Jack, DP-305423-1×Jack AFS 4818.1.2) soybean meal increases by 12% over Jack.

### Example 10

### Seed and Soybean Meal Compositional Change Summary for Genetic Stacking for Fatty Acid Composition, HiOil and HiProtein Traits in Soy

[0519] In Table 17, a summary of the ranges for the percent increase or decrease (percent change) for the average percent fatty acid, protein, oil and total soluble carbohydrate of transgenic seed compared to null seed is shown. Similarly, the ranges for the specific soluble carbohydrates sucrose and the total raffinosaccharides are also shown in Table 17.

TABLE 17
Range of percent changes in seed composition comparing transgenic seed to corresponding null
seed for events having altered fatty acid composition, HiOil and HiProtein Traits in Soy

| | | Fatty Acid Composition | | | | | | Seed Composition | | | | |
|---|---|---|---|---|---|---|---|---|---|---|---|---|
| | From | | | | | | Total | | | Total | Total | Total |
| Experiment | Tables- | 16:0 | 18:0 | 18:1 | 18:2 | 18:3 | Sats | Oil | Prot | Sol Carb | Rafs | Suc |
| Soil19 | 4, 5a | −7 to | 12 to | 23 to | −9 to | −73 to | 0 to | 7 to | 1 to | −24 to | −83 to | 34 to |
| | 6a | −21 | 46 | 83 | 1 | −82 | −11 | 21 | 3 | −30 | −85 | 35 |
| Soil42 | 6a 11 | −71 to | −21 to | 370 to | −87 to | −58 to | −58 to | 5 to | 1 to | −6 to | −67 to | 5 to |
| | | −74 | −24 | 414 | −91 | −66 | −61 | 14 | 4 | −24 | −78 | 30 |
| Soil43 | 11 13 | −78 | −23 | 359 | −92 | −68 | −64 | 7 to | −2 | −8 | −60 | 24 |
| | | | | | | | | 16 | | | | |
| DP-305423-1 and | 15 | −58 | 29 | 300 | −95 | −60 | | 17 | 7 | | | |
| AFS 4818.1.2 | | | | | | | | | | | | |

[0520] In Table 18, a summary of the ranges for the percent increase or decrease (percent change) for the average percent fatty acid, protein, oil and total soluble carbohydrate of transgenic soybean meal compared to null soybean meal is shown. Similarly, the ranges for the specific soluble carbohydrates sucrose and the total raffinosaccharides are also shown in Table 18.

TABLE 18
Range of percent changes in soybean meal composition
comparing transgenic soybean meal to corresponding
null soybean meal for events having altered fatty
acid composition, HiOil and HiProtein traits in Soy

| | From | | Total Sol | Total | Total |
|---|---|---|---|---|---|
| Exp | Tables | Protein | Carb | Rafs | Suc |
| Soil19 | 5b | 7 to 8 | −21 to −25 | −81 to −85 | 41 to 43 |
| | 6b | | | | |
| Soil42 | 14 | 5 to 6 | −5 to −21 | −67 to −77 | 9 to 33 |
| Soil43 | 14 | 3 | −4 | −58 | 28 |
| DP-305423-1 | 16 | 12 | | | |
| and AFS | | | | | |
| 4818.1.2 | | | | | |

### Example 11

### Identification and Cloning of the Soy Sucrose Synthase Promoter

[0521] The Arabidopsis Sucrose Synthase 2 gene has been described previously (PCT Publication No. WO 2010/114989) and the nucleotide and amino acid sequences are set forth in SEQ ID NO: 39 and SEQ ID NO: 40, respectively. A soybean homolog of the Arabidopsis Sucrose Synthase 2 gene was identified by conducting BLAST (Basic Local Alignment Search Tool; Altschul et al., J. Mol. Biol. 215:403-410 (1993)) searches for similarity to sequences contained in the Soybean Genome Project, DoE Joint Genome Institute “Glyma1.01” gene set. Specifically, the Arabidopsis Sucrose Synthase 2 amino acid sequence (SEQ ID NO: 40) was used with the TBLASTN algorithm provided by National Center for Biotechnology Information (NCBI) with default parameters except the Filter Option was set to OFF.

[0522] The soybean homolog to the Arabidopsis Sucrose Synthase 2 gene identified corresponded to Glyma13g17420 and the predicted genomic, cDNA, CDS and corresponding amino acid sequences from Glyma are set forth in SEQ IDs NO: 41, 42, 43, and 44, respectively.

[0523] Soybean cDNA libraries from developing soybean (e.g. cDNA library sdp3c) were prepared, clones sequenced and sequence was analyzed as described in U.S. Pat. No. 7,157,621 (the contents of which are herein incorporated by reference). A similar TBLASTN search against sequences from these soybean cDNA libraries identified a cDNA (EST sdp3c.pk014.n18) with a 5′ end that differed from that predicted in the Glyma13g17420 cDNA sequence (SEQ ID NO: 42) in that the intron was splice differently. The sequence for the 5′ end of EST sdp3c.pk014.n18 that was sequenced is set forth in SEQ ID NO: 45. The CDS from sdp3c.pk014.n18 appears to be the same as that for Glyma13g17420 (SEQ ID NO: 43). The soybean homolog to the Arabidopsis sucrose synthase 2 gene set forth in SEQ ID NO: 43 was named GmSus.

[0524] A region of genomic DNA upstream of the start codon of GmSus (SEQ ID NO: 43) was identified from the Glyma database by conducting BLAST searches as a promoter region and the sequence is set forth in SEQ ID NO: 46. FIG. 1 shows a schematic of the GmSus promoter region.

[0525] The identified GmSus promoter region encodes the 5′ UTR from the cDNA transcript (bp 2101 to 3191 from SEQ ID NO: 46) as well as an intron (bp 2134 to 3168 from SEQ ID NO: 46). The 5′ UTR region and intron was included as part of the promoter region as it contained an AW box (AW2 in FIG. 1) from by 2662 to 2675 of SEQ ID NO: 46 within the intron. Another AW box (AW1 in FIG. 1) occurs from by 616 to by 629 of SEQ ID NO: 46. AW boxes consist of the nucleotide sequence [CnTnG](n)7[CG] (SEQ ID NO:47), where n is any nucleotide, and AW boxes are binding sites for transcription factors such as wri1 in Arabidopsis (Maeo, K et al. (2009) Plant Journal 60(3): 476-487).

[0526] Genomic DNA was isolated from leaves of approximately 4 week old soy 93B86 plants using the DNEASY® Plant Mini Kit (Qiagen, Valencia, Calif.) and following the manufacture's protocol. The GmSus promoter region (SEQ ID NO:46) was PCR-amplified from 93B86 genomic DNA using oligonucleotides GmSuSyProm-5 (SEQ ID NO:48) and GmSuSyProm-5 (SEQ ID NO:49) with the PHUSION™ High-Fidelity DNA Polymerase (Cat. No. F553S, Finnzymes Oy, Finland), following the manufacturer's protocol. The resulting DNA fragment was cloned into the pCR®-BLUNT® cloning vector using the ZERO BLUNT® PCR Cloning Kit (Invitrogen Corporation), following the manufacturer's protocol, to produce pLF284 (SEQ ID NO:50).

[0527] The EcoRI fragment of pLF284 (SEQ ID NO: 50), containing the GmSus promoter region (called GmSusPro), was cloned into the EcoRI site of pNEB193 (New England BioLabs, Beverly, Mass.) to produce pKR1963 (SEQ ID NO: 51).

[0528] Plasmid pKR1543, which was previously described in PCT Publication No. WO 2011/079005 (published on Jun. 30, 2011, the contents of which are herein incorporated by reference), was digested with NotI/XbaI and the fragment containing the Leg terminator, previously described in PCT Publication No. WO 2004/071467 (published on Aug. 26, 2004, the contents of which are herein incorporated by reference) was cloned into the NotI/XbaI fragment of pKR1963 (SEQ ID NO: 51), containing the GmSusPro, to produce pKR1964 (SEQ ID NO: 52).

[0529] The BsiWI fragment of pKR1964 (SEQ ID NO: 52), containing the GmSusPro, was cloned into the BsiWI site of pKR325, previously described in PCT Publication No. WO 2004/071467, to produce pKR1965 (SEQ ID NO: 53). Plasmid pKR1965 contains a NotI site flanked by the GmSusPro and the Leg terminator as well as the hygromycin B phosphotransferase gene [Gritz, L. and Davies, J. (1983) Gene 25:179-188], flanked by the T7 promoter and transcription terminator, a bacterial origin of replication (ori) for selection and replication in E. coli and the hygromycin B phosphotransferase gene, flanked by the 35S promoter [Odell et al., (1985) Nature 313:810-812] and NOS 3′ transcription terminator [Depicker et al., (1982) J. Mol. Appl. Genet. 1:561:570] (35S/hpt/NOS3′ cassette) for selection in soybean. In this way, polynucleotides (e.g., protein-coding regions) flanked by NotI sites can be cloned into the NotI site of pKR1965 (SEQ ID NO: 53) and expressed in soy.

### Example 12

### Cloning LED and ODP1 Homologs from Soybean

[0530] GmLec1 from cDNA:

[0531] Soybean cDNA library se2, derived from developing soybean seeds (Glycine max L.) harvested at 13 days after flowering (DAF) was prepared, cDNA clones were sequenced and the sequence was analyzed as described in U.S. Pat. No. 7,157,621.

[0532] A cDNA clone (se2.11d12) was identified from cDNA library se2 with homology to transcription factor LEAFY COTYLEDON1 (Led) (Lotan, T. et al. (1998) Cell 93(7): 1195-1205).

[0533] The cDNA clone was fully sequenced by methods described in U.S. Pat. No. 7,157,621 and its sequence is set forth in SEQ ID NO: 54. This clone appears to have 2 separate cDNA clones inserted into it but the sequence from 38-718 by is 100% identical to the coding sequence of lec1b (NCBI Accession # EU088289.1 GI:158525282) and to the CDS of Glyma17g00950 based on a blast comparison. The coding sequence from clone se2.11d12, which corresponds to that of Glyma17g00950, is shown in SEQ ID NO:55 and the encoded amino acid sequence is shown in SEQ ID NO:56.

[0534] A separate cDNA clone (se1.pk0042.d8) identified from cDNA library se1, derived from developing soybean seeds (Glycine max L.) harvested at 6-10 DAF and described in U.S. Pat. No. 7,157,621, also contained a led homolog as determined by blast analysis. The full insert sequence of se1.pk0042.d8 is shown in SEQ ID NO:57. The sequence from cDNA clone se1.pk0042.d8 is 99% identical to the coding sequence of lec1a (NCBI Accession # EU088288.1 GI:158525280) and 100% identical to the CDS of Glyma07g39820 based on a blast comparison. The coding sequence from clone se1.pk0042.d8 appears to be 2 nt short of the ATG but is shown in SEQ ID NO: 58 with the correct start as compared to Glyma07g39820. The corresponding encoded amino acid sequence is shown in SEQ ID NO: 59.

[0535] DNA was also prepared from an aliquot of cDNA library se2 using the QIAprep® Spin Miniprep Kit (Qiagen Inc., Valencia, Calif.) following the manufacturer's protocol. The DNA from the cDNA library was used as template in a PCR reaction using oligonucleotides SA275 (SEQ ID NO: 60) and SA276 (SEQ ID NO: 61), using the “Platinum”-brand Taq DNA polymerase (Life Technologies), following the manufacturer's protocol. The PCR fragment was cloned using the pCR®8/GW/TOPO® TA Cloning Kit (Invitrogen Corporation) to produce plasmid Glyma17g00950/pCR8/GW/TOPO (SEQ ID NO: 62). The CDS from the PCR product contained in Glyma17g00950/pCR8/GW/TOPO (SEQ ID NO: 62), named GmLec1, is set forth in SEQ ID NO: 63 and the corresponding amino acid sequence of GmLec1 is set forth in SEQ ID NO: 64. It should be noted that both the CDS and amino acid sequence of GmLec1 are different than those corresponding to either Glyma17g00950 or Glyma07g39820. An alignment comparing the amino acid sequences of Glyma17g00950 (SEQ ID NO: 56), Glyma07g39820 (SEQ ID NO: 59) and GmLec1 (SEQ ID NO: 64) is shown in FIG. 2.

[0536] GmLec1 gene was PCR-amplified from Glyma17g00950/pCR8/GW/TOPO (SEQ ID NO: 62) using oligonucleotides Gmlec-5 (SEQ ID NO:65) and Gmlec-3 (SEQ ID NO:66) with the PHUSION™ High-Fidelity DNA Polymerase (Cat. No. F553S, Finnzymes Oy, Finland), following the manufacturer's protocol. The PCR fragment was cloned into the pCR®-BLUNT® cloning vector using the ZERO BLUNT® PCR Cloning Kit (Invitrogen Corporation), following the manufacturer's protocol, to produce pLF275 (SEQ ID NO: 67).

### NotI Fragment Containing GmODP1:

[0537] The soybean ODP (GmODP1) is described in U.S. Pat. No. 7,157,621. The cloning of GmODP1 with flanking NotI sites into plasmid KS334 was previously described in PCT Publication No. WO 2010/114989 (published on Oct. 7, 2010, the contents of which are herein incorporated by reference). It should be noted that there is a typo in the map of KS334 (SEQ ID NO: 14 in WO2010/114989) and that there should be an additional 3 nucleotides (TGA) at position 1237 to form a stop codon and end the CDS in KS334. The CDS and amino acid sequence of GmODP1 from WO2010/114989 are set forth here in SEQ ID NO: 68 and SEQ ID NO: 69, respectively.

### Example 13

### Expressing GmLec1 and GmODP1 in

### Soybean Seed Under Control of the GmSus Promoter

[0538] Artificial microRNAs Silencing Fad2 Genes as Reporter for Transgenic Events:

[0539] The fatty acid desaturase 2-1 (Fad2-1) or 2-2 (fad2-2) gene families (Heppard, E P, et al. (1996) Plant Physiology, 110(1): 311-319), also known as delta-12 desaturase or omega-6 desaturase (US Patent Numbers U.S. Pat. No. 6,872,872B1, U.S. Pat. No. 6,919,466B2 and U.S. Pat. No. 7,105,721B2), convert oleic acid into linoleic acid. Effective silencing of the fad2-1 and fad2-2 gene families seed-specifically in soy results in seed oil having an increased oleic acid content which can be detected using methods known to one skilled in the art such as those described herein. This increased oleic acid content can be used as a reporter to identify transgenic seed in segregating seed populations from null seed.

[0540] The design and synthesis of artificial microRNAs (amiRNAs), and the respective STAR sequences that pair with amiRNAs, for silencing the soy fad2-1 and fad2-2 genes was previously described in US20090155910A1 (WO 2009/079532) (the contents of which are incorporated by reference) and the sequences are described in Table 19.

TABLE 19
amiRNA and Star sequences for soy fad2-1 and fad2-2

| Gene | | SEQ | | SEQ |
|---|---|---|---|---|
| Family | amiRNA | ID NO | STAR Sequence | ID NO |
| GmFad2-1 | GM-MFAD2-1B | 84 | 396b-GM-MFAD2-1B | 70 |
| GmFad2-2 | GM-MFAD2-2 | 85 | 159-GM-MFAD2-2 | 71 |

[0541] The identification of the genomic miRNA precursor sequences 159 and 396b was described previously in US20090155910A1 (WO 2009/079532) and their sequences are set forth in SEQ ID NO: 72 and SEQ ID NO: 73, respectively.

[0542] Genomic miRNA precursor sequences 159 (SEQ ID NO: 72) and 396b (SEQ ID NO: 73) were converted to amiRNA precursors 396b-fad2-1 b and 159-fad2-2 using overlapping PCR as previously described in US20090155910A1 (WO 2009/079532).

[0543] amiRNA precursor 159-fad2-2 was cloned downstream of 396b-fad2-1 b to produce the amiRNA precursor 396b-fad2-1b/159-fad2-2 (SEQ ID NO: 74).

[0544] The amiRNA precursor 396b-fad2-1 b/159-fad2-2 (SEQ ID NO: 74) is 1577 nt in length and is substantially similar to the deoxyribonucleotide sequence set forth in SEQ ID NO: 73 (from nt 1 to 574 of 396b-fad2-1b/159-fad2-2) wherein nucleotides 196 to 216 of SEQ ID NO: 73 are replaced by GM-MFAD2-1B amiRNA (SEQ ID NO: 84) and wherein nucleotides 262 to 282 of SEQ ID NO: 73 are replaced by 396b-GM-MFAD2-1B Star Sequence (SEQ ID NO: 70). The amiRNA precursor 396b-fad2-1b/159-fad2-2 (SEQ ID NO: 74) is also, substantially similar to the deoxyribonucleotide sequence set forth in SEQ ID NO: 72 (from nt 620 to 1577 of 396b-fad2-1b/159-fad2-2) wherein nucleotides 276 to 296 of SEQ ID NO: 72 are replaced by GM-MFAD2-2 amiRNA (SEQ ID NO: 85) and wherein nucleotides 121 to 141 of SEQ ID NO: 72 are replaced by 159-GM-MFAD2-2 Star Sequence (SEQ ID NO: 71). In amiRNA precursor 396b-fad2-1b/159-fad2-2, nt 575 to 610 are derived from cloning.

Construction of Soybean Expression Vector pKR2109:

[0545] Using standard PCR and cloning methods by one skilled in the art, the following DNA elements were assembled to produce the 8095 by soybean expression vector pKR2109 (SEQ ID NO: 75) and having unique SbfI (nt 8093) and BsiWI (nt 1) restriction sites for cloning expression cassettes.

[0546] In pKR2109 (SEQ ID NO: 75), sequence 21-36 is a sequence of DNA comprising ORF stop codons in all 6 frames (ORFSTOP-A). Sequence 65-2578 is vector backbone containing the T7 promoter (sequence 1297-1394), the hygromycin phosphotransferase (hpt) gene coding region (sequence 1395-2435) and the T7 terminator (sequence 2436-2582). Sequence 2616-2632 is a sequence of DNA comprising ORF stop codons in all 6 frames (ORFSTOP-B). Sequence 2698-4006 is the constitutive soy SAMS promoter (U.S. Pat. No. 7,217,858). Sequence 4011-4058 is a FLP recombinase recognition site FRT1 (U.S. Pat. No. 8,293,533). Sequence 4068-5093 is the hygromycin phosphotransferase (hpt) gene coding region for selection in soy. Sequence 5102-5382 is the NOS 3′ transcription terminator (Depicker et al., J. Mol. Appl. Genet. 1:561-570 (1982)). Sequence 5400-6170 is the 776 by fragment of the soy annexin promoter (described in Applicants' Assignee's U.S. Pat. No. 7,129,089). Sequence 6179-7756 is the amiRNA precursor 396b-fad2-1 b/159-fad2-2 (SEQ ID NO: 74). Sequence 7773-7988 is the soy BD30 transcription terminator (described in Applicants' Assignee's U.S. Pat. No. 8,084,074). Sequence 8021-8068 is a FLP recombinase recognition site FRT87 (U.S. Pat. No. 8,293,533).

### Expressing GmLec1 and GmODP1 Soybean Under Control of the GmSus Promoter:

[0547] The NotI fragment of pLF275 (SEQ ID NO: 67, containing GmLec1 and the NotI fragment of KS334, containing GmODP1 were cloned into the NotI site of pKR1965 (SEQ ID NO: 53) to produce pKR1968 (SEQ ID NO: 76) and pKR1971 (SEQ ID NO: 77), respectively.

[0548] The SbfI fragments of pKR1968 (SEQ ID NO: 76), containing GmLec1 and pKR1971 (SEQ ID NO: 77), containing GmODP1 were cloned into the SbfI site of pKR2109 (SEQ ID NO: 75) to produce pKR2118 (SEQ ID NO: 78) and pKR2120 (SEQ ID NO: 79), respectively.

[0549] Each experiment was given a name and a summary of the experiment name, construct used and genes expressed is shown in Table 20.

TABLE 20
Summary of genes, plasmids and experiments

Gene SEQ ID NO

| Experiment | Plasmid | Gene | nt | aa |
|---|---|---|---|---|
| Oil109 | pKR2120 | GmODP1 | 80 | 81 |
| Oil110 | pKR2118 | GmLec1 | 82 | 83 |

[0550] DNA from these plasmids was prepared for particle bombardment into soybean embryogenic suspension culture and transformed exactly as described previously in PCT Publication No. WO 2008/147935. Soybean embryogenic suspension culture was initiated, grown and maintained and events were selected and matured exactly as described in PCT Publication No. WO 2008/147935. In this case, hygromycin was used for selection. Events from each of the 3 experiments were screened at the embryo stage for fatty acid profile by methods described herein and those displaying an increased oleic acid phenotype were advanced.

[0551] Embryos from selected events were dried and germinated and T0 plants were grown and maintained exactly as described in PCT Publication No. WO 2008/147935.

[0552] Approximately 36 T1 seeds from T0 plants for each event were harvested and individual T1 seed were analyzed for oil and protein content using Near Infrared Spectroscopy by methods familiar to one skilled in the art [Agelet, et al. (2012) Journal of Agricultural and Food Chemistry, 60(34): 8314-8322].

[0553] Seeds were also analyzed for fatty acid profile in order to identify transgenic and null seed. Those seed having oleic acid contents higher than approximately 30%, resulting from expression of the amiRNA precursor 396b-fad2-1b/159-fad2-2, were considered transgenic. Those with approximately less than 30% oleic acid content were considered null seed.

[0554] For each event, the average oil content of all transgenic seed and all null seed was determined. The average oil content of null seed was then subtracted from the average oil content of the transgenic seed and the difference is reported in Table 35 (Avg. Oil Delta %). The difference in average protein content between transgenic and null seed was similarly determined and is shown in Table 35 (Avg. Pro Delta %). The sum of the Avg. Oil Delta % and Avg. Pro Delta % (Avg. Proil Delta %) is also shown in Table 35. For a representative number of events of each construct at least 24 seeds were germinated in soil and germination rate was determined 10 days after planting.

[0555] In Table 21, the experiment name (Exp.), the gene being expressed (Gene) and the event name (Event) are also shown.

TABLE 21
Summary of difference in average oil and protein
contents between transgenic and null T1 seed for
soybean events expressing GmLec1 or GmODP1.

| | | | Avg. | Avg. | Avg. | Germi- |
|---|---|---|---|---|---|---|
| | | | Oil | Pro | Proil | nation |
| Exp. | Gene | Event | Delta % | Delta % | Delta % | % |
| Oil 109 | GmODP1 | 8810.5.1 | 1.9 | 2.4 | 4.3 | 99 |
| Oil 109 | GmODP1 | 8787.3.3 | 1.2 | 1.9 | 3.1 | 95 |
| Oil 109 | GmODP1 | 8787.12.2 | 0.4 | 2.4 | 2.8 | 90 |
| Oil 109 | GmODP1 | 878710.1 | 1.4 | 0.9 | 2.2 | 87 |
| Oil 109 | GmODP1 | 8787.4.1 | 0.7 | 1.4 | 2 | |
| Oil 109 | GmODP1 | 8787.8.4 | 1.1 | 0.8 | 1.9 | |
| Oil 109 | GmODP1 | 8787.10.5 | −0.2 | 1.8 | 1.7 | |
| Oil 109 | GmODP1 | 8787.7.3 | 1.3 | 0.4 | 1.7 | 79 |
| Oil 109 | GmODP1 | 8787.3.2 | 0.3 | 0.8 | 1.1 | |
| Oil 109 | GmODP1 | 8787.1.1 | −0.2 | 1 | 0.8 | 85 |
| Oil 109 | GmODP1 | 8787.6.4 | 0.2 | 0.4 | 0.7 | |
| Oil 109 | GmODP1 | 8787.12.3 | 1.7 | −1 | 0.6 | 95 |
| Oil 109 | GmODP1 | 8787.11.4 | 0 | 0.5 | 0.5 | 94 |
| Oil 109 | GmODP1 | 8787.6.3 | −1.5 | 0.5 | −1 | 83 |
| Oil 110 | GmLec1 | 8781.6.1 | 1 | 2 | 2.9 | 33 |
| Oil 110 | GmLec1 | 8781.2.2 | 0.9 | 1.8 | 2.8 | 91 |
| Oil 110 | GmLec1 | 8781.2.3 | 1.2 | 1.5 | 2.8 | 81 |
| Oil 110 | GmLec1 | 8781.10.5 | 0.9 | 1.9 | 2.8 | 81 |
| Oil 110 | GmLec1 | 8781.3.6 | 0.8 | 1.5 | 2.3 | 32 |
| Oil 110 | GmLec1 | 8781.11.2 | 0.7 | 1.3 | 2 | 69 |
| Oil 110 | GmLec1 | 8781.11.1 | 0.3 | 0.5 | 0.7 | |

[0556] Table 21 shows that average oil and protein content is increased when GmODP1 or GmLec1 is over-expressed in soybean under control of the GmSus promoter when compared to the average of null seed. Oil and protein (Proil) is increased by as high as 2.9 to 4.3 points in these events. Table 21 also shows that T1 seed germination frequency of events with significant oil and protein increase due to expression of ODP1, LEC1 and Fusca3 transcription factors can be as high as 99%, 91% and 78%, respectively.

[0557] T1 seed from events segregating as single copy (HiOleic Phenotype:Null=3:1) were planted, plants were grown exactly as for T0 plants and T2 seed were obtained. T2 seed from these events were analyzed for oleic acid and for oil and protein content by ssNIR exactly as described herein and results are shown for Oil109 in Table 22 and for Oil110 in Table 23. Classification of seed as being from a homozygous plant, heterozygous plant or null plant was determined using oleic acid, oil and protein data as well as using construct-specific quantitative PCR (qPCR) as described previously in U.S. Pat. No. 8,293,533, which issued Oct. 23, 2012 results on leaf punches from T1 plants as described herein.

[0558] For each event, the average oil content of all transgenic homozygous T2 seed and all null seed was determined. The average oil content of null seed was then subtracted from the average oil content of the homozygous T2 transgenic seed and the difference is reported in Table 22 (Avg. Oil Delta %). The difference in average protein content between T2 homozygous transgenic and null seed was similarly determined and is shown in Table 22 and Table 23 (Avg. Pro Delta %). The sum of the Avg. Oil Delta % and Avg. Pro Delta % (Avg. Proil Delta %) is also shown in

[0559] Table 22 and Table 23.

TABLE 22
Summary of difference in average oil and protein
contents between homozygous transgenic and null
T2 seed for soybean events expressing GmODP1

| | | | Avg. | Avg. | Avg. |
|---|---|---|---|---|---|
| | | | Oil | Pro | Proil |
| Exp. | Gene | Event | Delta % | Delta % | Delta % |
| Oil 109 | GmODP1 | 8787.10.1 | 1.8 | 2.8 | 4.7 |
| Oil 109 | GmODP1 | 8787.7.3 | 1.3 | 2.9 | 4.2 |
| Oil 109 | GmODP1 | 8810.5.1 | 1.5 | 1.5 | 3.0 |

[0560] Table 22 shows that average oil and protein content is increased when GmODP1 is over-expressed in soybean under control of the GmSus promoter when compared to the average of null seed. Oil and protein are increased by as high as 3.0 to 4.7 points in these single copy events.

TABLE 23
Summary of difference in average oil and protein
contents between homozygous transgenic and null
T2 seed for soybean events expressing GmLec1

| | | | Avg. | Avg. | Avg. |
|---|---|---|---|---|---|
| | | | Oil | Pro | Proil |
| Exp. | Gene | Event | Delta % | Delta % | Delta % |
| Oil 110 | GmLEC1 | 8781.11.2 | 2.6 | 1.1 | 3.7 |
| Oil 110 | GmLEC1 | 8781.3.6 | 0.8 | 1.0 | 1.8 |
| Oil 110 | GmLEC1 | 8781.7.8 | 1.3 | 2.9 | 4.1 |

[0561] Table 23. shows that average oil and protein content is increased when GmLEC1 is over-expressed in soybean under control of the GmSus promoter when compared to the average of null seed. Oil and protein are increased by as high as 1.8 to 4.1 points in these single copy events.

Compositional Analysis on Bulk T2 Seed from 011109 and 011110 Events:

[0562] T2 seed from homozygous and null plants from Oil 109 event 8787.7.3 (GmODP1) and Oil110 event 8781.7.8 (GmLEC1) were collected and 5 representative seed from each plant were crushed in a genogrinder as described so herein. Total oil content was determined by NMR and total protein content was determined using the combustion analyzer, on soy powders, exactly as described herein. Further, lipids were extracted from soy powders using heptane extraction and fatty acid composition was determined using GC-FAME analysis as described herein. Also, total non-structural soluble carbohydrate was extracted and quantified, and composition determined, using GC as described herein.

[0563] The results for fatty acid composition for T2 seed bulks from each homozygous transgenic plant, and the results for T2 seed bulks from each null plant are presented for both in Table 24. The total saturated fatty acid content (% Tot Sats) is calculated as the sum of the percent 16:0 and percent 18:0. The results for each plant were also averaged together and these averages are also presented in Table 24. In Table 24, fatty acid composition and average fatty acid composition for lipids from seeds from all homozygous transgenic or null plants are reported as a percent of total fatty acid.

[0564] The change in fatty acid composition (% FA transgenic−% FA null) and the percent increase or decrease (percent change) for the average of any particular fatty acid as is also shown in Table 24 where the percent is calculated in the following way; [(transgenic value-null value)/null value×100%].

[0565] Additionally, the results for oil content (% Oil; calculated as percent of soybean powder) and protein content (% Prot; calculated as percent of soybean powder) for null and transgenic seed are also shown in Table 24, as are the values for the sum of protein and oil content (% Proil; calculated as sum of % Oil and % Protein). The average percent Oil, percent Prot and percent Proil is also summarized in Table 24 as is the change and percent change, calculated as described for fatty acid composition.

TABLE 24
Fatty acid composition of lipids and percent Oil, percent Prot and percent Proil from bulk T2
seed powders from null and homozygous transgenic Oil109 (GmODP1) or Oil10 (GmLEC1) events.

| | | T2 | | % | % | | | | | | | % Tot |
|---|---|---|---|---|---|---|---|---|---|---|---|---|
| Exp | Event/Plant | Seed Pack | Type | Oil | Protein | Proil | %16:0 | %18:0 | %18:1 | %18:2 | %18:3 | Sats |
| Oil109 | 8787.7.3.4 | 12SN37-2200 | Null | 18.7 | 37.3 | 55.9 | 10.8 | 3.8 | 25.1 | 53.7 | 6.6 | 14.6 |
| Oil109 | 8787.7.3.4 | 12SN37-2305 | Null | 20.4 | 35.0 | 55.3 | 10.3 | 4.0 | 23.5 | 55.7 | 6.5 | 14.3 |
| Oil109 | 8787.7.3.4 | 12SN37-2341 | Null | 18.9 | 37.2 | 56.1 | 10.5 | 4.2 | 28.9 | 50.8 | 5.6 | 14.7 |
| | | | Avg. | 19.3 | 36.5 | 55.8 | 10.5 | 4.0 | 25.8 | 53.4 | 6.2 | 14.5 |
| Oil109 | 8787.7.3.4 | 12SN37-2269 | Trans | 19.9 | 38.3 | 58.2 | 6.9 | 3.5 | 87.9 | 0.5 | 1.2 | 10.4 |
| Oil109 | 8787.7.3.4 | 12SN37-2377 | Trans | 20.6 | 37.7 | 58.3 | 6.7 | 3.6 | 87.8 | 0.7 | 1.2 | 10.3 |
| | | | Avg. | 20.3 | 38.0 | 58.2 | 6.8 | 3.6 | 87.8 | 0.6 | 1.2 | 10.4 |
| OIL109 | | | Change | 1.0 | 1.5 | 2.5 | −3.7 | −0.5 | 62.0 | −52.8 | −5.0 | −4.2 |
| Oil109 | | | % Change | 5 | 4 | 4 | −35 | −11 | 240 | −99 | −81 | −29 |
| Oil110 | 8781.7.8.2 | 12GR27-200 | Null | 18.1 | 34.8 | 52.9 | 10.8 | 3.7 | 17.3 | 59.6 | 8.5 | 14.6 |
| Oil110 | 8781.7.8.2 | 12GR27-202 | Null | 18.0 | 38.0 | 56.0 | 10.7 | 3.7 | 20.9 | 57.3 | 7.3 | 14.4 |
| | | | Avg. | 18.0 | 36.4 | 54.4 | 10.8 | 3.7 | 19.1 | 58.5 | 7.9 | 14.5 |
| Oil110 | 8781.7.8.2 | 12GR27-174 | Avg. | 19.1 | 37.8 | 56.9 | 8.1 | 3.6 | 83.9 | 1.6 | 2.9 | 11.7 |
| Oil110 | 8781.7.8.2 | 12GR27-176 | Avg. | 18.2 | 38.8 | 57.0 | 7.1 | 3.6 | 85.0 | 1.4 | 2.8 | 10.7 |
| Oil110 | 8781.7.8.2 | 12GR27-184 | Avg. | 18.5 | 38.2 | 56.7 | 7.4 | 3.6 | 84.0 | 1.7 | 3.3 | 11.0 |
| | | | Avg. | 18.6 | 38.3 | 56.9 | 7.5 | 3.6 | 84.3 | 1.6 | 3.0 | 11.1 |
| Oil110 | | | Change | 0.5 | 1.9 | 2.4 | −3.3 | −0.1 | 65.2 | −56.9 | −4.9 | −3.4 |
| Oil110 | | | % Change | 3 | 5 | 4 | −30 | −3 | 341 | −97 | −62 | −23 |

[0566] The results for individual, non-structural carbohydrate content for T2 seed bulks from each homozygous transgenic and null plant are presented for in Table 25. In Table 25, non-structural, soluble carbohydrate content (pinitol, sorbitol, fructose, glucose, sucrose, galactinol, raffinose, stachyose) are reported as a percent of ground soy powder. Also presented are the total rafinosaccharides (% Total Rafs; calculated as the sum of raffinose and stachyose) and the total soluble carbohydrates (% Total Carbs; calculated as the sum of all individual carbohydrates). The results for each plant were also averaged together and these averages are also presented in Table 25 as is the change in soluble carbohydrate composition and the percent increase or decrease (percent change) for the average of any particular carbohydrate calculated as described herein.

TABLE 25
Non-structural, soluble carbohydrate content of bulk T2 seed powders from
null and homozygous transgenic Oil109 (GmODP1) or Oil110 (GmLEC1) events.

| | | T2 | | Pini- | Sorbi- | Fruc- | Glu- | Su- | Galac- | Raffi- | Stachy- | % Total | % Total |
|---|---|---|---|---|---|---|---|---|---|---|---|---|---|
| Exp | Event/Plant | Seed Pack | Type | tol | tol | tose | cose | crose | tinol | nose | ose | Carbs | Rafs |
| Oil109 | 8787.7.3.4 | 12SN37-2200 | Null | 0.3 | 0.0 | 0.0 | 0.0 | 4.2 | 0.0 | 0.7 | 3.9 | 9.2 | 4.6 |
| Oil109 | 8787.7.3.4 | 12SN37-2305 | Null | 0.6 | 0.0 | 0.0 | 0.0 | 4.5 | 0.0 | 0.7 | 3.4 | 9.2 | 4.1 |
| Oil109 | 8787.7.3.4 | 2341 | Null | 0.7 | 0.0 | 0.1 | 0.0 | 3.8 | 0.0 | 0.8 | 3.3 | 8.7 | 4.1 |
| | | | Avg. | 0.5 | 0.0 | 0.0 | 0.0 | 4.2 | 0.0 | 0.7 | 3.5 | 9.0 | 4.3 |
| Oil109 | 8787.7.3.4 | 12SN37-2269 | Trans | 0.4 | 0.0 | 0.1 | 0.0 | 3.8 | 0.0 | 0.7 | 3.5 | 8.4 | 4.1 |
| Oil109 | 8787.7.3.4 | 12SN37-2377 | Trans | 0.5 | 0.0 | 0.0 | 0.0 | 4.2 | 0.0 | 0.6 | 3.6 | 9.1 | 4.3 |
| | | | Avg. | 0.5 | 0.0 | 0.1 | 0.0 | 4.0 | 0.0 | 0.6 | 3.5 | 8.7 | 4.2 |
| Oil109 | | | Change | −0.1 | 0.0 | 0.0 | 0.0 | −0.2 | 0.0 | −0.1 | 0.0 | −0.3 | −0.1 |
| Oil109 | | | % Change | −0.1 | 0.1 | 0.2 | 0.0 | 0.0 | 0.4 | −0.1 | 0.0 | 0.0 | 0.0 |
| Oil110 | 8781.7.8.2 | 12GR27-200 | Null | 0.3 | 0.0 | 0.0 | 0.0 | 6.4 | 0.0 | 1.2 | 3.5 | 11.4 | 4.7 |
| Oil110 | 8781.7.8.2 | 12GR27-202 | Null | 0.4 | 0.0 | 0.0 | 0.0 | 6.3 | 0.0 | 1.1 | 3.1 | 11.0 | 4.2 |
| | | | Avg. | 0.3 | 0.0 | 0.0 | 0.0 | 6.4 | 0.0 | 1.1 | 3.3 | 11.2 | 4.4 |
| Oil110 | 8781.7.8.2 | 12GR27-174 | Avg. | 0.2 | 0.0 | 0.0 | 0.0 | 5.1 | 0.0 | 0.8 | 2.9 | 9.0 | 3.6 |
| Oil110 | 8781.7.8.2 | 12GR27-176 | Avg. | 0.3 | 0.0 | 0.0 | 0.0 | 4.5 | 0.0 | 1.0 | 3.3 | 9.1 | 4.3 |
| Oil110 | 8781.7.8.2 | 12GR27-184 | Avg. | 0.1 | 0.0 | 0.0 | 0.0 | 4.9 | 0.0 | 0.8 | 3.4 | 9.3 | 4.2 |
| | | | | 0.2 | 0.0 | 0.0 | 0.0 | 4.8 | 0.0 | 0.9 | 3.2 | 9.2 | 4.0 |
| Oil110 | | | Change | −0.1 | 0.0 | 0.0 | 0.0 | −1.5 | 0.0 | −0.3 | −0.1 | −2.1 | −0.4 |
| Oil110 | | | % Change | −36 | −15 | 2 | −75 | −24 | 1 | −25 | −4 | −18 | −9 |

[0567] A soybean meal can be generated by one skilled in the art and the resulting protein and soluble carbohydrate compositions can be calculated for the resulting soybean meal using the composition obtained for the seed as described above. Given the average oil, protein and total soluble carbohydrate compositions shown in Table 25, the resulting average protein and soluble carbohydrate compositions can be calculated for a soybean meal, as described herein, and these are shown in Table 26.

TABLE 26
Soluble carbohydrate and protein of calculated for a soybean meal generated from null and transgenic Oil109 and Oil110 events.

| | | T2 | | % | Pini- | Sorbi- | Fruc- | Glu- | Su- | Galac- | Raffi- | Stachy- | % Total | % Total |
|---|---|---|---|---|---|---|---|---|---|---|---|---|---|---|
| Experiment | Event/Plant | Seed Pack | Type | Protein | tol | tol | tose | cose | crose | tinol | nose | ose | Carbs | Rafs |
| Oil109 | 8787.7.3.4 | 12SN37-2200 | Null | 45.8 | 0.4 | 0.0 | 0.0 | 0.0 | 5.2 | 0.0 | 0.8 | 4.8 | 11.3 | 5.7 |
| Oil109 | 8787.7.3.4 | 12SN37-2305 | Null | 43.9 | 0.7 | 0.0 | 0.1 | 0.0 | 5.6 | 0.0 | 0.9 | 4.3 | 11.6 | 5.2 |
| Oil109 | 8787.7.3.4 | 12SN37-2341 | Null | 45.8 | 0.9 | 0.0 | 0.1 | 0.0 | 4.7 | 0.0 | 0.9 | 4.1 | 10.8 | 5.0 |
| | | | Avg. | 45.2 | 0.7 | 0.0 | 0.1 | 0.0 | 5.2 | 0.0 | 0.9 | 4.4 | 11.2 | 5.3 |
| Oil109 | 8787.7.3.4 | 12SN37-2269 | Trans | 47.8 | 0.5 | 0.0 | 0.1 | 0.0 | 4.7 | 0.0 | 0.8 | 4.3 | 10.5 | 5.1 |
| Oil109 | 8787.7.3.4 | 12SN37-2377 | Trans | 47.5 | 0.7 | 0.0 | 0.1 | 0.0 | 5.3 | 0.0 | 0.8 | 4.6 | 11.4 | 5.4 |
| | | | Avg. | 47.6 | 0.6 | 0.0 | 0.1 | 0.0 | 5.0 | 0.0 | 0.8 | 4.4 | 11.0 | 5.2 |
| Oil109 | | | Change | 2.4 | −0.1 | 0.0 | 0.0 | 0.0 | −0.2 | 0.0 | −0.1 | 0.1 | −0.2 | 0.0 |
| Oil109 | | | % Change | 0.1 | −0.1 | 0.1 | 0.2 | 0.0 | 0.0 | 0.4 | −0.1 | 0.0 | 0.0 | 0.0 |
| Oil110 | 8781.7.8.2 | 12GR27-200 | Null | 42.5 | 0.3 | 0.1 | 0.0 | 0.0 | 7.8 | 0.0 | 1.4 | 4.3 | 13.9 | 5.7 |
| Oil110 | 8781.7.8.2 | 12GR27-202 | Null | 46.3 | 0.4 | 0.1 | 0.0 | 0.0 | 7.7 | 0.0 | 1.3 | 3.8 | 13.4 | 5.2 |
| | | | | 44.4 | 0.4 | 0.1 | 0.0 | 0.0 | 7.8 | 0.0 | 1.4 | 4.0 | 13.7 | 5.4 |
| Oil110 | 8781.7.8.2 | 12GR27-174 | Avg. | 46.7 | 0.3 | 0.0 | 0.0 | 0.0 | 6.3 | 0.0 | 0.9 | 3.5 | 11.1 | 4.5 |
| Oil110 | 8781.7.8.2 | 12GR27-176 | Avg. | 47.4 | 0.3 | 0.1 | 0.0 | 0.0 | 5.5 | 0.0 | 1.2 | 4.0 | 11.2 | 5.2 |
| Oil110 | 8781.7.8.2 | 12GR27-184 | Avg. | 46.9 | 0.2 | 0.0 | 0.0 | 0.0 | 6.0 | 0.0 | 1.0 | 4.2 | 11.4 | 5.2 |
| | | | | 47.0 | 0.3 | 0.0 | 0.0 | 0.0 | 5.9 | 0.0 | 1.0 | 3.9 | 11.2 | 4.9 |
| Oil110 | | | Change | 2.6 | −0.1 | 0.0 | 0.0 | 0.0 | −1.8 | 0.0 | −0.3 | −0.1 | −2.5 | −0.5 |
| Oil110 | | | % Change | 6 | −36 | −15 | 3 | −75 | −23 | 2 | −24 | −4 | −18 | −9 |

The application's sequence listing, which the Patent Office published only in electronic form, follows.

SEQUENCE LISTING (143 sequences)

SEQ ID NO: 1 - DNA, 8060 bp, artificial sequence
  plasmid pKR1756
ggccgcaagtatgaactaaaatgcatgtaggtgtaagagctcatggagagcatggaatattgtatccgaccatgtaacagtataataactgagctccatctcacttcttctatgaataaacaaaggatgttatgatatattaacactctatctatgcaccttattgttctatgataaatttcctcttattattataaatcatctgaatcgtgacggcttatggaatgcttcaaatagtacaaaaacaaatgtgtactataagactttctaaacaattctaaccttagcattgtgaacgagacataagtgttaagaagacataacaattataatggaagaagtttgtctccatttatatattatatattacccacttatgtattatattaggatgttaaggagacataacaattataaagagagaagtttgtatccatttatatattatatactacccatttatatattatacttatccacttatttaatgtctttataaggtttgatccatgatatttctaatattttagttgatatgtatatgaaagggtactatttgaactctcttactctgtataaaggttggatcatccttaaagtgggtctatttaattttattgcttcttacagataaaaaaaaaattatgagttggtttgataaaatattgaaggatttaaaataataataaataacatataatatatgtatataaatttattataatataacatttatctataaaaaagtaaatattgtcataaatctatacaatcgtttagccttgctggacgaatctcaattatttaaacgagagtaaacatatttgactttttggttatttaacaaattattatttaacactatatgaaatttttttttttatcagcaaagaataaaattaaattaagaaggacaatggtgtcccaatccttatacaaccaacttccacaagaaagtcaagtcagagacaacaaaaaaacaagcaaaggaaattttttaatttgagttgtcttgtttgctgcataatttatgcagtaaaacactacacataacccttttagcagtagagcaatggttgaccgtgtgcttagcttcttttattttatttttttatcagcaaagaataaataaaataaaatgagacacttcagggatgtttcaacaagcttggcgcgccgttctatagtgtcacctaaatcgtatgtgtatgatacataaggttatgtattaattgtagccgcgttctaacgacaatatgtccatatggtgcactctcagtacaatctgctctgatgccgcatagttaagccagccccgacacccgccaacacccgctgacgcgccctgacgggcttgtctgctcccggcatccgcttacagacaagctgtgaccgtctccgggagctgcatgtgtcagaggttttcaccgtcatcaccgaaacgcgcgagacgaaagggcctcgtgatacgcctatttttataggttaatgtcatgaccaaaatcccttaacgtgagttttcgttccactgagcgtcagaccccgtagaaaagatcaaaggatcttcttgagatcctttttttctgcgcgtaatctgctgcttgcaaacaaaaaaaccaccgctaccagcggtggtttgtttgccggatcaagagctaccaactctttttccgaaggtaactggcttcagcagagcgcagataccaaatactgtccttctagtgtagccgtagttaggccaccacttcaagaactctgtagcaccgcctacatacctcgctctgctaatcctgttaccagtggctgctgccagtggcgataagtcgtgtcttaccgggttggactcaagacgatagttaccggataaggcgcagcggtcgggctgaacggggggttcgtgcacacagcccagcttggagcgaacgacctacaccgaactgagatacctacagcgtgagcattgagaaagcgccacgcttcccgaagggagaaaggcggacaggtatccggtaagcggcagggtcggaacaggagagcgcacgagggagcttccagggggaaacgcctggtatctttatagtcctgtcgggtttcgccacctctgacttgagcgtcgatttttgtgatgctcgtcaggggggcggagcctatggaaaaacgccagcaacgcggcctttttacggttcctggccttttgctggccttttgctcacatgttctttcctgcgttatcccctgattctgtggataaccgtattaccgcctttgagtgagctgataccgctcgccgcagccgaacgaccgagcgcagcgagtcagtgagcgaggaagcggaagagcgcccaatacgcaaaccgcctctccccgcgcgttggccgattcattaatgcaggttgatcgattcgacatcgatctagtaacatagatgacaccgcgcgcgataatttatcctagtttgcgcgctatattttgttttctatcgcgtattaaatgtataattgcgggactctaatcataaaaacccatctcataaataacgtcatgcattacatgttaattattacatgcttaacgtaattcaacagaaattatatgataatcatcgcaagaccggcaacaggattcaatcttaagaaactttattgccaaatgtttgaacgatctgcttcgacgcactccttctttaggtacctcactattcctttgccctcggacgagtgctggggcgtcggtttccactatcggcgagtacttctacacagccatcggtccagacggccgcgcttctgcgggcgatttgtgtacgcccgacagtcccggctccggatcggacgattgcgtcgcatcgaccctgcgcccaagctgcatcatcgaaattgccgtcaaccaagctctgatagagttggtcaagaccaatgcggagcatatacgcccggagccgcggcgatcctgcaagctccggatgcctccgctcgaagtagcgcgtctgctgctccatacaagccaaccacggcctccagaagaagatgttggcgacctcgtattgggaatccccgaacatcgcctcgctccagtcaatgaccgctgttatgcggccattgtccgtcaggacattgttggagccgaaatccgcgtgcacgaggtgccggacttcggggcagtcctcggcccaaagcatcagctcatcgagagcctgcgcgacggacgcactgacggtgtcgtccatcacagtttgccagtgatacacatggggatcagcaatcgcgcatatgaaatcacgccatgtagtgtattgaccgattccttgcggtccgaatgggccgaacccgctcgtctggctaagatcggccgcagcgatcgcatccatggcctccgcgaccggctgcagaacagcgggcagttcggtttcaggcaggtcttgcaacgtgacaccctgtgcacggcgggagatgcaataggtcaggctctcgctgaattccccaatgtcaagcacttccggaatcgggagcgcggccgatgcaaagtgccgataaacataacgatctttgtagaaaccatcggcgcagctatttacccgcaggacatatccacgccctcctacatcgaagctgaaagcacgagattcttcgccctccgagagctgcatcaggtcggagacgctgtcgaacttttcgatcagaaacttctcgacagacgtcgcggtgagttcaggctttttcatggtttaataagaagagaaaagagttcttttgttatggctgaagtaatagagaaatgagctcgagcgtgtcctctccaaatgaaatgaacttccttatatagaggaagggtcttgcgaaggatagtgggattgtgcgtcatcccttacgtcagtggagatgtcacatcaatccacttgctttgaagacgtggttggaacgtcttctttttccacgatgctcctcgtgggtgggggtccatctttgggaccactgtcggcagaggcatcttgaatgatagcctttcctttatcgcaatgatggcatttgtaggagccaccttccttttctactgtcctttcgatgaagtgacagatagctgggcaatggaatccgaggaggtttcccgaaattatcctttgttgaaaagtctcaatagccctttggtcttctgagactgtatctttgacatttttggagtagaccagagtgtcgtgctccaccatgttgacgaagattttcttcttgtcattgagtcgtaaaagactctgtatgaactgttcgccagtcttcacggcgagttctgttagatcctcgatttgaatcttagactccatgcatggccttagattcagtaggaactacctttttagagactccaatctctattacttgccttggtttatgaagcaagccttgaatcgtccatactggaatagtacttctgatcttgagaaatatgtctttctctgtgttcttgatgcaattagtcctgaatcttttgactgcatctttaaccttcttgggaaggtatttgatctcctggagattgttactcgggtagatcgtcttgatgagacctgctgcgtaggcctctctaaccatctgtgggtcagcattctttctgaaattgaagaggctaaccttctcattatcagtggtgaacatagtgtcgtcaccttcaccttcgaacttccttcctagatcgtaaagatagaggaaatcgtccattgtaatctccggggcaaaggagatctcttttggggctggatcactgctgggccttttggttcctagcgtgagccagtgggctttttgctttggtgggcttgttagggccttagcaaagctcttgggcttgagttgagcttctcctttggggatgaagttcaacctgtctgtttgctgacttgttgtgtacgcgtcagctgctgctcttgcctctgtaatagtggcaaatttcttgtgtgcaactccgggaacgccgtttgttgccgcctttgtacaaccccagtcatcgtatataccggcatgtggaccgttatacacaacgtagtagttgatatgagggtgttgaatacccgattctgctctgagaggagcaactgtgctgttaagctcagatttttgtgggattggaattggatcgatctcgatcccgcgaaattaatacgactcactatagggagaccacaacggtttccctctagaaataattttgtttaactttaagaaggagatatacccatggaaaagcctgaactcaccgcgacgtctgtcgagaagtttctgatcgaaaagttcgacagcgtctccgacctgatgcagctctcggagggcgaagaatctcgtgctttcagcttcgatgtaggagggcgtggatatgtcctgcgggtaaatagctgcgccgatggtttctacaaagatcgttatgtttatcggcactttgcatcggccgcgctcccgattccggaagtgcttgacattggggaattcagcgagagcctgacctattgcatctcccgccgtgcacagggtgtcacgttgcaagacctgcctgaaaccgaactgcccgctgttctgcagccggtcgcggaggctatggatgcgatcgctgcggccgatcttagccagacgagcgggttcggcccattcggaccgcaaggaatcggtcaatacactacatggcgtgatttcatatgcgcgattgctgatccccatgtgtatcactggcaaactgtgatggacgacaccgtcagtgcgtccgtcgcgcaggctctcgatgagctgatgctttgggccgaggactgccccgaagtccggcacctcgtgcacgcggatttcggctccaacaatgtcctgacggacaatggccgcataacagcggtcattgactggagcgaggcgatgttcggggattcccaatacgaggtcgccaacatcttcttctggaggccgtggttggcttgtatggagcagcagacgcgctacttcgagcggaggcatccggagcttgcaggatcgccgcggctccgggcgtatatgctccgcattggtcttgaccaactctatcagagcttggttgacggcaatttcgatgatgcagcttgggcgcagggtcgatgcgacgcaatcgtccgatccggagccgggactgtcgggcgtacacaaatcgcccgcagaagcgcggccgtctggaccgatggctgtgtagaagtactcgccgatagtggaaaccgacgccccagcactcgtccgagggcaaaggaatagtgaggtacagcttggatcgatccggctgctaacaaagcccgaaaggaagctgagttggctgctgccaccgctgagcaataactagcataaccccttggggcctctaaacgggtcttgaggggttttttgctgaaaggaggaactatatccggatgatcgggcgcgccgtcgacggatccgtacgagatccggccggccagatcctgcaggagatccaagcttttgatccatgcccttcatttgccgcttattaattaatttggtaacagtccgtactaatcagttacttatccttcccccatcataattaatcttggtagtctcgaatgccacaacactgactagtctcttggatcataagaaaaagccaaggaacaaaagaagacaaaacacaatgagagtatcctttgcatagcaatgtctaagttcataaaattcaaacaaaaacgcaatcacacacagtggacatcacttatccactagctgatcaggatcgccgcgtcaagaaaaaaaaactggaccccaaaagccatgcacaacaacacgtactcacaaaggtgtcaatcgagcagcccaaaacattcaccaactcaacccatcatgagccctcacatttgttgtttctaacccaacctcaaactcgtattctcttccgccacctcatttttgtttatttcaacacccgtcaaactgcatgccaccccgtggccaaatgtccatgcatgttaacaagacctatgactataaatagctgcaatctcggcccaggttttcatcatcaagaaccagttcaatatcctagtacaccgtattaaagaatttaagatatactgcggccgcttctagctagctagggtttgggtagtgagtgtaataaagttgcaaagtttttggttaggttacgttttgaccttattattatagttcaaagggaaacattaattaaaggggattatgaagtgggctctcttgattcttggatgaggatcttactgggtgaattgagctgcttagctatggatcccacagttctacccatcaataagtgcttttgtggtagtcttgtggcttccatatctggggagcttcatttgcctttatagtattaaccttctccaagaacaaagagagcccacacccttctcttcttttctctcataataatttaaatttgttatagactctaaactttaaatgttttttttgaagtttttccgtttttctcttttgccatgatcccgttcttgctgtggagtaaccttgtccgaggtatgtgcatgattagatccatacttaatttgtgtgcatcacgaaggtgaggttgaaatgaactttgcttttttgaccttttaggaaagttcttttgttgcagtaatcaattttaattagttttaattgacactattacttttattgtcatctttgttagttttattgttgaattgagtgcatatttcctaggaaattctcttacctaacattttttatacagatctatgctcttggctcttgcccttactcttggccttgtgttggttatttgtctacatatttattgactggtcgatgagacatgtcacaattcttgggcttatttgttggtctaataaaaggagtgcttattgaaagatcaagacggagattcggttttatataaataaactaaagatgacatattagtgtgttgatgtctcttcaggataatttttgtttgaaataatatggtaatgtcttgtctaaatttgtgtacataattcttactgattttttggattgttggatttttataaacaaatctggggcccaagc

SEQ ID NO: 2 - DNA, 966 bp, artificial sequence
  159-fad3c amiRNA
ggccgcttctagctagctagggtttgggtagtgagtgtaataaagttgcaaagtttttggttaggttacgttttgaccttattattatagttcaaagggaaacattaattaaaggggattatgaagtgggctctcttgattcttggatgaggatcttactgggtgaattgagctgcttagctatggatcccacagttctacccatcaataagtgcttttgtggtagtcttgtggcttccatatctggggagcttcatttgcctttatagtattaaccttctccaagaacaaagagagcccacacccttctcttcttttctctcataataatttaaatttgttatagactctaaactttaaatgttttttttgaagtttttccgtttttctcttttgccatgatcccgttcttgctgtggagtaaccttgtccgaggtatgtgcatgattagatccatacttaatttgtgtgcatcacgaaggtgaggttgaaatgaactttgcttttttgaccttttaggaaagttcttttgttgcagtaatcaattttaattagttttaattgacactattacttttattgtcatctttgttagttttattgttgaattgagtgcatatttcctaggaaattctcttacctaacattttttatacagatctatgctcttggctcttgcccttactcttggccttgtgttggttatttgtctacatatttattgactggtcgatgagacatgtcacaattcttgggcttatttgttggtctaataaaaggagtgcttattgaaagatcaagacggagattcggttttatataaataaactaaagatgacatattagtgtgttgatgtctcttcaggataatttttgtttgaaataatatggtaatgtcttgtctaaatttgtgtacataattcttactgattttttggattgttggatttttataaacaaatctgc

SEQ ID NO: 3 - DNA, 1983 bp, artificial sequence
  Ann-fad3c-BD30 BsiW/Sbfi fragment
gtacgtctttccacaatacataactattaattaatcttaaataaataaaggataaaatatttttttttcttcataaagttaaaatatgttattttttgtttagatgtatattcgaataaatctaaatatatgataatgattttttatattgattaaacatataatcaatattaaatatgatatttttttatataggttgtacacataattttataaggataaaaaatatgataaaaataaattttaaatatttttatatttacgagaaaaaaaaatattttagccataaataaatgaccagcatattttacaaccttagtaattcataaattcctatatgtatatttgaaattaaaaacagataatcgttaagggaaggaatcctacgtcatctcttgccatttgtttttcatgcaaacagaaagggacgaaaaaccacctcaccatgaatcactcttcacaccatttttactagcaaacaagtctcaacaactgaagccagctctctttccgtttctttttacaacactttctttgaaatagtagtattttttttcacatgatttattaacgtgccaaaagatgcttattgaatagagtgcacatttgtaatgtactactaattagaacatgaaaaagcattgttctaacacgataatcctgtgaaggcgttaactccaaagatccaatttcactatataaattgtgacgaaagcaaaatgaattcacatagctgagagagaaaggaaaggttaactaagaagcaatacttcagcggccgcttctagctagctagggtttgggtagtgagtgtaataaagttgcaaagtttttggttaggttacgttttgaccttattattatagttcaaagggaaacattaattaaaggggattatgaagtgggctctcttgattcttggatgaggatcttactgggtgaattgagctgcttagctatggatcccacagttctacccatcaataagtgcttttgtggtagtcttgtggcttccatatctggggagcttcatttgcctttatagtattaaccttctccaagaacaaagagagcccacacccttctcttcttttctctcataataatttaaatttgttatagactctaaactttaaatgttttttttgaagtttttccgtttttctcttttgccatgatcccgttcttgctgtggagtaaccttgtccgaggtatgtgcatgattagatccatacttaatttgtgtgcatcacgaaggtgaggttgaaatgaactttgcttttttgaccttttaggaaagttcttttgttgcagtaatcaattttaattagttttaattgacactattacttttattgtcatctttgttagttttattgttgaattgagtgcatatttcctaggaaattctcttacctaacattttttatacagatctatgctcttggctcttgcccttactcttggccttgtgttggttatttgtctacatatttattgactggtcgatgagacatgtcacaattcttgggcttatttgttggtctaataaaaggagtgcttattgaaagatcaagacggagattcggttttatataaataaactaaagatgacatattagtgtgttgatgtctcttcaggataatttttgtttgaaataatatggtaatgtcttgtctaaatttgtgtacataattcttactgattttttggattgttggatttttataaacaaatctgcggccgcatgagccgtaaaggttcaatacaacgagtgcttgttttcttagggacaagcattgtacttatgtatgattctgtgtaaccatgagtcttccacgttgtactaatgtgaagggcaaaaataaaacacagaacaagttcgtttttctcaaataatgtgaaggtagaaaatggaaccatgcctcctctcttgcatgtgatttaaaatattagcagatggtacgtcgagtcgacctgca

SEQ ID NO: 4 - DNA, 2577 bp, artificial sequence
  plasmid pKR277
agcttggatctcctgcaggatctggccggccggatctcgtacggatccgtcgacggcgcgcccgatcatccggatatagttcctcctttcagcaaaaaacccctcaagacccgtttagaggccccaaggggttatgctagttattgctcagcggtggcagcagccaactcagcttcctttcgggctttgttagcagccggatcgatccaagctgtacctcactattcctttgccctcggacgagtgctggggcgtcggtttccactatcggcgagtacttctacacagccatcggtccagacggccgcgcttctgcgggcgatttgtgtacgcccgacagtcccggctccggatcggacgattgcgtcgcatcgaccctgcgcccaagctgcatcatcgaaattgccgtcaaccaagctctgatagagttggtcaagaccaatgcggagcatatacgcccggagccgcggcgatcctgcaagctccggatgcctccgctcgaagtagcgcgtctgctgctccatacaagccaaccacggcctccagaagaagatgttggcgacctcgtattgggaatccccgaacatcgcctcgctccagtcaatgaccgctgttatgcggccattgtccgtcaggacattgttggagccgaaatccgcgtgcacgaggtgccggacttcggggcagtcctcggcccaaagcatcagctcatcgagagcctgcgcgacggacgcactgacggtgtcgtccatcacagtttgccagtgatacacatggggatcagcaatcgcgcatatgaaatcacgccatgtagtgtattgaccgattccttgcggtccgaatgggccgaacccgctcgtctggctaagatcggccgcagcgatcgcatccatagcctccgcgaccggctgcagaacagcgggcagttcggtttcaggcaggtcttgcaacgtgacaccctgtgcacggcgggagatgcaataggtcaggctctcgctgaattccccaatgtcaagcacttccggaatcgggagcgcggccgatgcaaagtgccgataaacataacgatctttgtagaaaccatcggcgcagctatttacccgcaggacatatccacgccctcctacatcgaagctgaaagcacgagattcttcgccctccgagagctgcatcaggtcggagacgctgtcgaacttttcgatcagaaacttctcgacagacgtcgcggtgagttcaggcttttccatgggtatatctccttcttaaagttaaacaaaattatttctagagggaaaccgttgtggtctccctatagtgagtcgtattaatttcgcgggatcgagatctgatcaacctgcattaatgaatcggccaacgcgcggggagaggcggtttgcgtattgggcgctcttccgcttcctcgctcactgactcgctgcgctcggtcgttcggctgcggcgagcggtatcagctcactcaaaggcggtaatacggttatccacagaatcaggggataacgcaggaaagaacatgtgagcaaaaggccagcaaaaggccaggaaccgtaaaaaggccgcgttgctggcgtttttccataggctccgcccccctgacgagcatcacaaaaatcgacgctcaagtcagaggtggcgaaacccgacaggactataaagataccaggcgtttccccctggaagctccctcgtgcgctctcctgttccgaccctgccgcttaccggatacctgtccgcctttctcccttcgggaagcgtggcgctttctcaatgctcacgctgtaggtatctcagttcggtgtaggtcgttcgctccaagctgggctgtgtgcacgaaccccccgttcagcccgaccgctgcgccttatccggtaactatcgtcttgagtccaacccggtaagacacgacttatcgccactggcagcagccactggtaacaggattagcagagcgaggtatgtaggcggtgctacagagttcttgaagtggtggcctaactacggctacactagaaggacagtatttggtatctgcgctctgctgaagccagttaccttcggaaaaagagttggtagctcttgatccggcaaacaaaccaccgctggtagcggtggtttttttgtttgcaagcagcagattacgcgcagaaaaaaaggatctcaagaagatcctttgatcttttctacggggtctgacgctcagtggaacgaaaactcacgttaagggattttggtcatgacattaacctataaaaataggcgtatcacgaggccctttcgtctcgcgcgtttcggtgatgacggtgaaaacctctgacacatgcagctcccggagacggtcacagcttgtctgtaagcggatgccgggagcagacaagcccgtcagggcgcgtcagcgggtgttggcgggtgtcggggctggcttaactatgcggcatcagagcagattgtactgagagtgcaccatatggacatattgtcgttagaacgcggctacaattaatacataaccttatgtatcatacacatacgatttaggtgacactatagaacggcgcgcca

SEQ ID NO: 5 - DNA, 4531 bp, artificial sequence
  plasmid pKR1850
ggagatccaagcttggcgcgccgttctatagtgtcacctaaatcgtatgtgtatgatacataaggttatgtattaattgtagccgcgttctaacgacaatatgtccatatggtgcactctcagtacaatctgctctgatgccgcatagttaagccagccccgacacccgccaacacccgctgacgcgccctgacgggcttgtctgctcccggcatccgcttacagacaagctgtgaccgtctccgggagctgcatgtgtcagaggttttcaccgtcatcaccgaaacgcgcgagacgaaagggcctcgtgatacgcctatttttataggttaatgtcatgaccaaaatcccttaacgtgagttttcgttccactgagcgtcagaccccgtagaaaagatcaaaggatcttcttgagatcctttttttctgcgcgtaatctgctgcttgcaaacaaaaaaaccaccgctaccagcggtggtttgtttgccggatcaagagctaccaactctttttccgaaggtaactggcttcagcagagcgcagataccaaatactgtccttctagtgtagccgtagttaggccaccacttcaagaactctgtagcaccgcctacatacctcgctctgctaatcctgttaccagtggctgctgccagtggcgataagtcgtgtcttaccgggttggactcaagacgatagttaccggataaggcgcagcggtcgggctgaacggggggttcgtgcacacagcccagcttggagcgaacgacctacaccgaactgagatacctacagcgtgagcattgagaaagcgccacgcttcccgaagggagaaaggcggacaggtatccggtaagcggcagggtcggaacaggagagcgcacgagggagcttccagggggaaacgcctggtatctttatagtcctgtcgggtttcgccacctctgacttgagcgtcgatttttgtgatgctcgtcaggggggcggagcctatggaaaaacgccagcaacgcggcctttttacggttcctggccttttgctggccttttgctcacatgttctttcctgcgttatcccctgattctgtggataaccgtattaccgcctttgagtgagctgataccgctcgccgcagccgaacgaccgagcgcagcgagtcagtgagcgaggaagcggaagagcgcccaatacgcaaaccgcctctccccgcgcgttggccgattcattaatgcaggttgatcagatctcgatcccgcgaaattaatacgactcactatagggagaccacaacggtttccctctagaaataattttgtttaactttaagaaggagatatacccatggaaaagcctgaactcaccgcgacgtctgtcgagaagtttctgatcgaaaagttcgacagcgtctccgacctgatgcagctctcggagggcgaagaatctcgtgctttcagcttcgatgtaggagggcgtggatatgtcctgcgggtaaatagctgcgccgatggtttctacaaagatcgttatgtttatcggcactttgcatcggccgcgctcccgattccggaagtgcttgacattggggaattcagcgagagcctgacctattgcatctcccgccgtgcacagggtgtcacgttgcaagacctgcctgaaaccgaactgcccgctgttctgcagccggtcgcggaggctatggatgcgatcgctgcggccgatcttagccagacgagcgggttcggcccattcggaccgcaaggaatcggtcaatacactacatggcgtgatttcatatgcgcgattgctgatccccatgtgtatcactggcaaactgtgatggacgacaccgtcagtgcgtccgtcgcgcaggctctcgatgagctgatgctttgggccgaggactgccccgaagtccggcacctcgtgcacgcggatttcggctccaacaatgtcctgacggacaatggccgcataacagcggtcattgactggagcgaggcgatgttcggggattcccaatacgaggtcgccaacatcttcttctggaggccgtggttggcttgtatggagcagcagacgcgctacttcgagcggaggcatccggagcttgcaggatcgccgcggctccgggcgtatatgctccgcattggtcttgaccaactctatcagagcttggttgacggcaatttcgatgatgcagcttgggcgcagggtcgatgcgacgcaatcgtccgatccggagccgggactgtcgggcgtacacaaatcgcccgcagaagcgcggccgtctggaccgatggctgtgtagaagtactcgccgatagtggaaaccgacgccccagcactcgtccgagggcaaaggaatagtgaggtacagcttggatcgatccggctgctaacaaagcccgaaaggaagctgagttggctgctgccaccgctgagcaataactagcataaccccttggggcctctaaacgggtcttgaggggttttttgctgaaaggaggaactatatccggatgatcgggcgcgccgtcgacggatccgtacgtctttccacaatacataactattaattaatcttaaataaataaaggataaaatatttttttttcttcataaagttaaaatatgttattttttgtttagatgtatattcgaataaatctaaatatatgataatgattttttatattgattaaacatataatcaatattaaatatgatatttttttatataggttgtacacataattttataaggataaaaaatatgataaaaataaattttaaatatttttatatttacgagaaaaaaaaatattttagccataaataaatgaccagcatattttacaaccttagtaattcataaattcctatatgtatatttgaaattaaaaacagataatcgttaagggaaggaatcctacgtcatctcttgccatttgtttttcatgcaaacagaaagggacgaaaaaccacctcaccatgaatcactcttcacaccatttttactagcaaacaagtctcaacaactgaagccagctctctttccgtttctttttacaacactttctttgaaatagtagtattttttttcacatgatttattaacgtgccaaaagatgcttattgaatagagtgcacatttgtaatgtactactaattagaacatgaaaaagcattgttctaacacgataatcctgtgaaggcgttaactccaaagatccaatttcactatataaattgtgacgaaagcaaaatgaattcacatagctgagagagaaaggaaaggttaactaagaagcaatacttcagcggccgcttctagctagctagggtttgggtagtgagtgtaataaagttgcaaagtttttggttaggttacgttttgaccttattattatagttcaaagggaaacattaattaaaggggattatgaagtgggctctcttgattcttggatgaggatcttactgggtgaattgagctgcttagctatggatcccacagttctacccatcaataagtgcttttgtggtagtcttgtggcttccatatctggggagcttcatttgcctttatagtattaaccttctccaagaacaaagagagcccacacccttctcttcttttctctcataataatttaaatttgttatagactctaaactttaaatgttttttttgaagtttttccgtttttctcttttgccatgatcccgttcttgctgtggagtaaccttgtccgaggtatgtgcatgattagatccatacttaatttgtgtgcatcacgaaggtgaggttgaaatgaactttgcttttttgaccttttaggaaagttcttttgttgcagtaatcaattttaattagttttaattgacactattacttttattgtcatctttgttagttttattgttgaattgagtgcatatttcctaggaaattctcttacctaacattttttatacagatctatgctcttggctcttgcccttactcttggccttgtgttggttatttgtctacatatttattgactggtcgatgagacatgtcacaattcttgggcttatttgttggtctaataaaaggagtgcttattgaaagatcaagacggagattcggttttatataaataaactaaagatgacatattagtgtgttgatgtctcttcaggataatttttgtttgaaataatatggtaatgtcttgtctaaatttgtgtacataattcttactgattttttggattgttggatttttataaacaaatctgcggccgcatgagccgtaaaggttcaatacaacgagtgcttgttttcttagggacaagcattgtacttatgtatgattctgtgtaaccatgagtcttccacgttgtactaatgtgaagggcaaaaataaaacacagaacaagttcgtttttctcaaataatgtgaaggtagaaaatggaaccatgcctcctctcttgcatgtgatttaaaatattagcagatggtacgtcgagtcgacctgca

SEQ ID NO: 6 - DNA, 11611 bp, artificial sequence
  plasmid KS362
  misc_feature (2349)..(2349): n is a, c, g, or t
ggccgcaagtatgaactaaaatgcatgtaggtgtaagagctcatggagagcatggaatattgtatccgaccatgtaacagtataataactgagctccatctcacttcttctatgaataaacaaaggatgttatgatatattaacactctatctatgcaccttattgttctatgataaatttcctcttattattataaatcatctgaatcgtgacggcttatggaatgcttcaaatagtacaaaaacaaatgtgtactataagactttctaaacaattctaaccttagcattgtgaacgagacataagtgttaagaagacataacaattataatggaagaagtttgtctccatttatatattatatattacccacttatgtattatattaggatgttaaggagacataacaattataaagagagaagtttgtatccatttatatattatatactacccatttatatattatacttatccacttatttaatgtctttataaggtttgatccatgatatttctaatattttagttgatatgtatatgaaagggtactatttgaactctcttactctgtataaaggttggatcatccttaaagtgggtctatttaattttattgcttcttacagataaaaaaaaaattatgagttggtttgataaaatattgaaggatttaaaataataataaataacatataatatatgtatataaatttattataatataacatttatctataaaaaagtaaatattgtcataaatctatacaatcgtttagccttgctggacgaatctcaattatttaaacgagagtaaacatatttgactttttggttatttaacaaattattatttaacactatatgaaatttttttttttatcagcaaagaataaaattaaattaagaaggacaatggtgtcccaatccttatacaaccaacttccacaagaaagtcaagtcagagacaacaaaaaaacaagcaaaggaaattttttaatttgagttgtcttgtttgctgcataatttatgcagtaaaacactacacataacccttttagcagtagagcaatggttgaccgtgtgcttagcttcttttattttatttttttatcagcaaagaataaataaaataaaatgagacacttcagggatgtttcaacaagcttggatcctcgaagagaagggttaataacacacttttttaacatttttaacacaaattttagttatttaaaaatttattaaaaaatttaaaataagaagaggaactctttaaataaatctaacttacaaaatttatgatttttaataagttttcaccaataaaaaatgtcataaaaatatgttaaaaagtatattatcaatattctctttatgataaataaaaagaaaaaaaaaataaaagttaagtgaaaatgagattgaagtgactttaggtgtgtataaatatatcaaccccgccaacaatttatttaatccaaatatattgaagtatattattccatagcctttatttatttatatatttattatataaaagctttatttgttctaggttgttcatgaaatatttttttggttttatctccgttgtaagaaaatcatgtgctttgtgtcgccactcactattgcagctttttcatgcattggtcagattgacggttgattgtatttttgttttttatggttttgtgttatgacttaagtcttcatctctttatctcttcatcaggtttgatggttacctaatatggtccatgggtacatgcatggttaaattaggtggccaactttgttgtgaacgatagaattttttttatattaagtaaactatttttatattatgaaataataataaaaaaaatattttatcattattaacaaaatcatattagttaatttgttaactctataataaaagaaatactgtaacattcacattacatggtaacatctttccaccctttcatttgttttttgtttgatgactttttttcttgtttaaatttatttcccttcttttaaatttggaatacattatcatcatatataaactaaaatactaaaaacaggattacacaaatgataaataataacacaaatatttataaatctagctgcaatatatttaaactagctatatcgatattgtaaaataaaactagctgcattgatactgataaaaaaatatcatgtgctttctggactgatgatgcagtatacttttgacattgcctttattttatttttcagaaaagctttcttagttctgggttcttcattatttgtttcccatctccattgtgaattgaatcatttgcttcgtgtcacaaatacaatttagntaggtacatgcattggtcagattcacggtttattatgtcatgacttaagttcatggtagtacattacctgccacgcatgcattatattggttagatttgataggcaaatttggttgtcaacaatataaatataaataatgtttttatattacgaaataacagtgatcaaaacaaacagttttatctttattaacaagattttgtttttgtttgatgacgttttttaatgtttacgctttcccccttcttttgaatttagaacactttatcatcataaaatcaaatactaaaaaaattacatatttcataaataataacacaaatatttttaaaaaatctgaaataataatgaacaatattacatattatcacgaaaattcattaataaaaatattatataaataaaatgtaatagtagttatatgtaggaaaaaagtactgcacgcataatatatacaaaaagattaaaatgaactattataaataataacactaaattaatggtgaatcatatcaaaataatgaaaaagtaaataaaatttgtaattaacttctatatgtattacacacacaaataataaataatagtaaaaaaaattatgataaatatttaccatctcataagatatttaaaataatgataaaaatatagattattttttatgcaactagctagccaaaaagagaacacgggtatatataaaaagagtacctttaaattctactgtacttcctttattcctgacgtttttatatcaagtggacatacgtgaagattttaattatcagtctaaatatttcattagcacttaatacttttctgttttattcctatcctataagtagtcccgattctcccaacattgcttattcacacaactaactaagaaagtcttccatagccccccaagcggcccatggcctcctccgaggacgtcatcaaggagttcatgcgcttcaaggtgcgcatggagggctccgtgaacggccacgagttcgagatcgagggcgagggcgagggccgcccctacgagggcacccagaccgccaagctgaaggtgaccaagggcggccccctgcccttcgcctgggacatcctgtccccccagttccagtacggctccaaggtgtacgtgaagcaccccgccgacatccccgactacaagaagctgtccttccccgagggcttcaagtgggagcgcgtgatgaacttcgaggacggcggcgtggtgaccgtgacccaggactcctccctgcaggacggctccttcatctacaaggtgaagttcatcggcgtgaacttcccctccgacggccccgtaatgcagaagaagactatgggctgggaggcctccaccgagcgcctgtacccccgcgacggcgtgctgaagggcgagatccacaaggccctgaagctgaaggacggcggccactacctggtggagttcaagtccatctacatggccaagaagcccgtgcagctgcccggctactactacgtggactccaagctggacatcacctcccacaacgaggactacaccatcgtggagcagtacgagcgcgccgagggccgccaccacctgttcctgtagcggccggccgcgacacaagtgtgagagtactaaataaatgctttggttgtacgaaatcattacactaaataaaataatcaaagcttatatatgccttccgctaaggccgaatgcaaagaaattggttctttctcgttatcttttgccacttttactagtacgtattaattactacttaatcatctttgtttacggctcattatatccgtcgacggcgcgccgctctagaactagtggatccgtcgacggcgcgcccgatcatccggatatagttcctcctttcagcaaaaaacccctcaagacccgtttagaggccccaaggggttatgctagttattgctcagcggtggcagcagccaactcagcttcctttcgggctttgttagcagccggatcgatccaagctgtacctcactattcctttgccctcggacgagtgctggggcgtcggtttccactatcggcgagtacttctacacagccatcggtccagacggccgcgcttctgcgggcgatttgtgtacgcccgacagtcccggctccggatcggacgattgcgtcgcatcgaccctgcgcccaagctgcatcatcgaaattgccgtcaaccaagctctgatagagttggtcaagaccaatgcggagcatatacgcccggagccgcggcgatcctgcaagctccggatgcctccgctcgaagtagcgcgtctgctgctccatacaagccaaccacggcctccagaagaagatgttggcgacctcgtattgggaatccccgaacatcgcctcgctccagtcaatgaccgctgttatgcggccattgtccgtcaggacattgttggagccgaaatccgcgtgcacgaggtgccggacttcggggcagtcctcggcccaaagcatcagctcatcgagagcctgcgcgacggacgcactgacggtgtcgtccatcacagtttgccagtgatacacatggggatcagcaatcgcgcatatgaaatcacgccatgtagtgtattgaccgattccttgcggtccgaatgggccgaacccgctcgtctggctaagatcggccgcagcgatcgcatccatagcctccgcgaccggctgcagaacagcgggcagttcggtttcaggcaggtcttgcaacgtgacaccctgtgcacggcgggagatgcaataggtcaggctctcgctgaattccccaatgtcaagcacttccggaatcgggagcgcggccgatgcaaagtgccgataaacataacgatctttgtagaaaccatcggcgcagctatttacccgcaggacatatccacgccctcctacatcgaagctgaaagcacgagattcttcgccctccgagagctgcatcaggtcggagacgctgtcgaacttttcgatcagaaacttctcgacagacgtcgcggtgagttcaggcttttccatgggtatatctccttcttaaagttaaacaaaattatttctagagggaaaccgttgtggtctccctatagtgagtcgtattaatttcgcgggatcgagatcgatccaattccaatcccacaaaaatctgagcttaacagcacagttgctcctctcagagcagaatcgggtattcaacaccctcatatcaactactacgttgtgtataacggtccacatgccggtatatacgatgactggggttgtacaaaggcggcaacaaacggcgttcccggagttgcacacaagaaatttgccactattacagaggcaagagcagcagctgacgcgtacacaacaagtcagcaaacagacaggttgaacttcatccccaaaggagaagctcaactcaagcccaagagctttgctaaggccctaacaagcccaccaaagcaaaaagcccactggctcacgctaggaaccaaaaggcccagcagtgatccagccccaaaagagatctcctttgccccggagattacaatggacgatttcctctatctttacgatctaggaaggaagttcgaaggtgaaggtgacgacactatgttcaccactgataatgagaaggttagcctcttcaatttcagaaagaatgctgacccacagatggttagagaggcctacgcagcaggtctcatcaagacgatctacccgagtaacaatctccaggagatcaaataccttcccaagaaggttaaagatgcagtcaaaagattcaggactaattgcatcaagaacacagagaaagacatatttctcaagatcagaagtactattccagtatggacgattcaaggcttgcttcataaaccaaggcaagtaatagagattggagtctctaaaaaggtagttcctactgaatctaaggccatgcatggagtctaagattcaaatcgaggatctaacagaactcgccgtgaagactggcgaacagttcatacagagtcttttacgactcaatgacaagaagaaaatcttcgtcaacatggtggagcacgacactctggtctactccaaaaatgtcaaagatacagtctcagaagaccaaagggctattgagacttttcaacaaaggataatttcgggaaacctcctcggattccattgcccagctatctgtcacttcatcgaaaggacagtagaaaaggaaggtggctcctacaaatgccatcattgcgataaaggaaaggctatcattcaagatgcctctgccgacagtggtcccaaagatggacccccacccacgaggagcatcgtggaaaaagaagacgttccaaccacgtcttcaaagcaagtggattgatgtgacatctccactgacgtaagggatgacgcacaatcccactatccttcgcaagacccttcctctatataaggaagttcatttcatttggagaggacacgctcgagctcatttctctattacttcagccataacaaaagaactcttttctcttcttattaaaccatgaaaaagcctgaactcaccgcgacgtctgtcgagaagtttctgatcgaaaagttcgacagcgtctccgacctgatgcagctctcggagggcgaagaatctcgtgctttcagcttcgatgtaggagggcgtggatatgtcctgcgggtaaatagctgcgccgatggtttctacaaagatcgttatgtttatcggcactttgcatcggccgcgctcccgattccggaagtgcttgacattggggaattcagcgagagcctgacctattgcatctcccgccgtgcacagggtgtcacgttgcaagacctgcctgaaaccgaactgcccgctgttctgcagccggtcgcggaggccatggatgcgatcgctgcggccgatcttagccagacgagcgggttcggcccattcggaccgcaaggaatcggtcaatacactacatggcgtgatttcatatgcgcgattgctgatccccatgtgtatcactggcaaactgtgatggacgacaccgtcagtgcgtccgtcgcgcaggctctcgatgagctgatgctttgggccgaggactgccccgaagtccggcacctcgtgcacgcggatttcggctccaacaatgtcctgacggacaatggccgcataacagcggtcattgactggagcgaggcgatgttcggggattcccaatacgaggtcgccaacatcttcttctggaggccgtggttggcttgtatggagcagcagacgcgctacttcgagcggaggcatccggagcttgcaggatcgccgcggctccgggcgtatatgctccgcattggtcttgaccaactctatcagagcttggttgacggcaatttcgatgatgcagcttgggcgcagggtcgatgcgacgcaatcgtccgatccggagccgggactgtcgggcgtacacaaatcgcccgcagaagcgcggccgtctggaccgatggctgtgtagaagtactcgccgatagtggaaaccgacgccccagcactcgtccgagggcaaaggaatagtgaggtacctaaagaaggagtgcgtcgaagcagatcgttcaaacatttggcaataaagtttcttaagattgaatcctgttgccggtcttgcgatgattatcatataatttctgttgaattacgttaagcatgtaataattaacatgtaatgcatgacgttatttatgagatgggtttttatgattagagtcccgcaattatacatttaatacgcgatagaaaacaaaatatagcgcgcaaactaggataaattatcgcgcgcggtgtcatctatgttactagatcgatgtcgaatctgatcaacctgcattaatgaatcggccaacgcgcggggagaggcggtttgcgtattgggcgctcttccgcttcctcgctcactgactcgctgcgctcggtcgttcggctgcggcgagcggtatcagctcactcaaaggcggtaatacggttatccacagaatcaggggataacgcaggaaagaacatgtgagcaaaaggccagcaaaaggccaggaaccgtaaaaaggccgcgttgctggcgtttttccataggctccgcccccctgacgagcatcacaaaaatcgacgctcaagtcagaggtggcgaaacccgacaggactataaagataccaggcgtttccccctggaagctccctcgtgcgctctcctgttccgaccctgccgcttaccggatacctgtccgcctttctcccttcgggaagcgtggcgctttctcaatgctcacgctgtaggtatctcagttcggtgtaggtcgttcgctccaagctgggctgtgtgcacgaaccccccgttcagcccgaccgctgcgccttatccggtaactatcgtcttgagtccaacccggtaagacacgacttatcgccactggcagcagccactggtaacaggattagcagagcgaggtatgtaggcggtgctacagagttcttgaagtggtggcctaactacggctacactagaaggacagtatttggtatctgcgctctgctgaagccagttaccttcggaaaaagagttggtagctcttgatccggcaaacaaaccaccgctggtagcggtggtttttttgtttgcaagcagcagattacgcgcagaaaaaaaggatctcaagaagatcctttgatcttttctacggggtctgacgctcagtggaacgaaaactcacgttaagggattttggtcatgacattaacctataaaaataggcgtatcacgaggccctttcgtctcgcgcgtttcggtgatgacggtgaaaacctctgacacatgcagctcccggagacggtcacagcttgtctgtaagcggatgccgggagcagacaagcccgtcagggcgcgtcagcgggtgttggcgggtgtcggggctggcttaactatgcggcatcagagcagattgtactgagagtgcaccatatggacatattgtcgttagaacgcggctacaattaatacataaccttatgtatcatacacatacgatttaggtgacactatagaacggcgcgccaagcttttgatccatgcccttcatttgccgcttattaattaatttggtaacagtccgtactaatcagttacttatccttcccccatcataattaatcttggtagtctcgaatgccacaacactgactagtctcttggatcataagaaaaagccaaggaacaaaagaagacaaaacacaatgagagtatcctttgcatagcaatgtctaagttcataaaattcaaacaaaaacgcaatcacacacagtggacatcacttatccactagctgatcaggatcgccgcgtcaagaaaaaaaaactggaccccaaaagccatgcacaacaacacgtactcacaaaggtgtcaatcgagcagcccaaaacattcaccaactcaacccatcatgagccctcacatttgttgtttctaacccaacctcaaactcgtattctcttccgccacctcatttttgtttatttcaacacccgtcaaactgcatgccaccccgtggccaaatgtccatgcatgttaacaagacctatgactataaatagctgcaatctcggcccaggttttcatcatcaagaaccagttcaatatcctagtacaccgtattaaagaatttaagatatactgcggccgcatgactatcgactcacaatactacaagtcgcgagacaaaaacgacacggcacccaaaatcgcgggaatccgatatgccccgctatcgacaccattactcaaccgatgtgagaccttctctctggtctggcacattttcagcattcccactttcctcacaattttcatgctatgctgcgcaattccactgctctggccatttgtgattgcgtatgtagtgtacgctgttaaagacgactccccgtccaacggaggagtggtcaagcgatactcgcctatttcaagaaacttcttcatctggaagctctttggccgctacttccccataactctgcacaagacggtggatctggagcccacgcacacatactaccctctggacgtccaggagtatcacctgattgctgagagatactggccgcagaacaagtacctccgagcaatcatcaccaccatcgagtactttctgcccgccttcatgaaacggtctctttctatcaacgagcaggagcagcctgccgagcgagatcctctcctgtctcccgtttctcccagctctccgggttctcaacctgacaagtggattaaccacgacagcagatatagccgtggagaatcatctggctccaacggccacgcctcgggctccgaacttaacggcaacggcaacaacggcaccactaaccgacgacctttgtcgtccgcctctgctggctccactgcatctgattccacgcttcttaacgggtccctcaactcctacgccaaccagatcattggcgaaaacgacccacagctgtcgcccacaaaactcaagcccactggcagaaaatacatcttcggctaccacccccacggcattatcggcatgggagcctttggtggaattgccaccgagggagctggatggtccaagctctttccgggcatccctgtttctcttatgactctcaccaacaacttccgagtgcctctctacagagagtacctcatgagtctgggagtcgcttctgtctccaagaagtcctgcaaggccctcctcaagcgaaaccagtctatctgcattgtcgttggtggagcacaggaaagtcttctggccagacccggtgtcatggacctggtgctactcaagcgaaagggttttgttcgacttggtatggaggtcggaaatgtcgcccttgttcccatcatggcctttggtgagaacgacctctatgaccaggttagcaacgacaagtcgtccaagctgtaccgattccagcagtttgtcaagaacttccttggattcacccttcctttgatgcatgcccgaggcgtcttcaactacgatgtcggtcttgtcccctacaggcgacccgtcaacattgtggttggttcccccattgacttgccttatctcccacaccccaccgacgaagaagtgtccgaataccacgaccgatacatcgccgagctgcagcgaatctacaacgagcacaaggatgaatatttcatcgattggaccgaggagggcaaaggagccccagagttccgaatgattgagtaagc

SEQ ID NO: 7 - DNA, 3332 bp, artificial sequence
  DNA fragment -beta conglycinin/YLDGAT2/phaseolin cassette
gtacgatccatgcccttcatttgccgcttattaattaatttggtaacagtccgtactaatcagttacttatccttcccccatcataattaatcttggtagtctcgaatgccacaacactgactagtctcttggatcataagaaaaagccaaggaacaaaagaagacaaaacacaatgagagtatcctttgcatagcaatgtctaagttcataaaattcaaacaaaaacgcaatcacacacagtggacatcacttatccactagctgatcaggatcgccgcgtcaagaaaaaaaaactggaccccaaaagccatgcacaacaacacgtactcacaaaggtgtcaatcgagcagcccaaaacattcaccaactcaacccatcatgagccctcacatttgttgtttctaacccaacctcaaactcgtattctcttccgccacctcatttttgtttatttcaacacccgtcaaactgcatgccaccccgtggccaaatgtccatgcatgttaacaagacctatgactataaatagctgcaatctcggcccaggttttcatcatcaagaaccagttcaatatcctagtacaccgtattaaagaatttaagatatactgcggccgcatgactatcgactcacaatactacaagtcgcgagacaaaaacgacacggcacccaaaatcgcgggaatccgatatgccccgctatcgacaccattactcaaccgatgtgagaccttctctctggtctggcacattttcagcattcccactttcctcacaattttcatgctatgctgcgcaattccactgctctggccatttgtgattgcgtatgtagtgtacgctgttaaagacgactccccgtccaacggaggagtggtcaagcgatactcgcctatttcaagaaacttcttcatctggaagctctttggccgctacttccccataactctgcacaagacggtggatctggagcccacgcacacatactaccctctggacgtccaggagtatcacctgattgctgagagatactggccgcagaacaagtacctccgagcaatcatcaccaccatcgagtactttctgcccgccttcatgaaacggtctctttctatcaacgagcaggagcagcctgccgagcgagatcctctcctgtctcccgtttctcccagctctccgggttctcaacctgacaagtggattaaccacgacagcagatatagccgtggagaatcatctggctccaacggccacgcctcgggctccgaacttaacggcaacggcaacaacggcaccactaaccgacgacctttgtcgtccgcctctgctggctccactgcatctgattccacgcttcttaacgggtccctcaactcctacgccaaccagatcattggcgaaaacgacccacagctgtcgcccacaaaactcaagcccactggcagaaaatacatcttcggctaccacccccacggcattatcggcatgggagcctttggtggaattgccaccgagggagctggatggtccaagctctttccgggcatccctgtttctcttatgactctcaccaacaacttccgagtgcctctctacagagagtacctcatgagtctgggagtcgcttctgtctccaagaagtcctgcaaggccctcctcaagcgaaaccagtctatctgcattgtcgttggtggagcacaggaaagtcttctggccagacccggtgtcatggacctggtgctactcaagcgaaagggttttgttcgacttggtatggaggtcggaaatgtcgcccttgttcccatcatggcctttggtgagaacgacctctatgaccaggttagcaacgacaagtcgtccaagctgtaccgattccagcagtttgtcaagaacttccttggattcacccttcctttgatgcatgcccgaggcgtcttcaactacgatgtcggtcttgtcccctacaggcgacccgtcaacattgtggttggttcccccattgacttgccttatctcccacaccccaccgacgaagaagtgtccgaataccacgaccgatacatcgccgagctgcagcgaatctacaacgagcacaaggatgaatatttcatcgattggaccgaggagggcaaaggagccccagagttccgaatgattgagtaagcggccgcaagtatgaactaaaatgcatgtaggtgtaagagctcatggagagcatggaatattgtatccgaccatgtaacagtataataactgagctccatctcacttcttctatgaataaacaaaggatgttatgatatattaacactctatctatgcaccttattgttctatgataaatttcctcttattattataaatcatctgaatcgtgacggcttatggaatgcttcaaatagtacaaaaacaaatgtgtactataagactttctaaacaattctaaccttagcattgtgaacgagacataagtgttaagaagacataacaattataatggaagaagtttgtctccatttatatattatatattacccacttatgtattatattaggatgttaaggagacataacaattataaagagagaagtttgtatccatttatatattatatactacccatttatatattatacttatccacttatttaatgtctttataaggtttgatccatgatatttctaatattttagttgatatgtatatgaaaaggtactatttgaactctcttactctgtataaaggttggatcatccttaaagtgggtctatttaattttattgcttcttacagataaaaaaaaaattatgagttggtttgataaaatattgaaggatttaaaataataataaataacatataatatatgtatataaatttattataatataacatttatctataaaaaagtaaatattgtcataaatctatacaatcgtttagccttgctggaacgaatctcaattatttaaacgagagtaaacatatttgactttttggttatttaacaaattattatttaacactatatgaaatttttttttttatcagcaaagaataaaattaaattaagaaggacaatggtgtcccaatccttatacaaccaacttccacaagaaagtcaagtcagagacaacaaaaaaacaagcaaaggaaattttttaatttgagttgtcttgtttgctgcataatttatgcagtaaaacactacacataacccttttagcagtagagcaatggttgaccgtgtgcttagcttcttttattttatttttttatcagcaaagaataaataaaataaaatgagacacttcagggatgtttcaac

SEQ ID NO: 8 - DNA, 7863 bp, artificial sequence
  pKR1975
gtacgtctttccacaatacataactattaattaatcttaaataaataaaggataaaatatttttttttcttcataaagttaaaatatgttattttttgtttagatgtatattcgaataaatctaaatatatgataatgattttttatattgattaaacatataatcaatattaaatatgatatttttttatataggttgtacacataattttataaggataaaaaatatgataaaaataaattttaaatatttttatatttacgagaaaaaaaaatattttagccataaataaatgaccagcatattttacaaccttagtaattcataaattcctatatgtatatttgaaattaaaaacagataatcgttaagggaaggaatcctacgtcatctcttgccatttgtttttcatgcaaacagaaagggacgaaaaaccacctcaccatgaatcactcttcacaccatttttactagcaaacaagtctcaacaactgaagccagctctctttccgtttctttttacaacactttctttgaaatagtagtattttttttcacatgatttattaacgtgccaaaagatgcttattgaatagagtgcacatttgtaatgtactactaattagaacatgaaaaagcattgttctaacacgataatcctgtgaaggcgttaactccaaagatccaatttcactatataaattgtgacgaaagcaaaatgaattcacatagctgagagagaaaggaaaggttaactaagaagcaatacttcagcggccgcttctagctagctagggtttgggtagtgagtgtaataaagttgcaaagtttttggttaggttacgttttgaccttattattatagttcaaagggaaacattaattaaaggggattatgaagtgggctctcttgattcttggatgaggatcttactgggtgaattgagctgcttagctatggatcccacagttctacccatcaataagtgcttttgtggtagtcttgtggcttccatatctggggagcttcatttgcctttatagtattaaccttctccaagaacaaagagagcccacacccttctcttcttttctctcataataatttaaatttgttatagactctaaactttaaatgttttttttgaagtttttccgtttttctcttttgccatgatcccgttcttgctgtggagtaaccttgtccgaggtatgtgcatgattagatccatacttaatttgtgtgcatcacgaaggtgaggttgaaatgaactttgcttttttgaccttttaggaaagttcttttgttgcagtaatcaattttaattagttttaattgacactattacttttattgtcatctttgttagttttattgttgaattgagtgcatatttcctaggaaattctcttacctaacattttttatacagatctatgctcttggctcttgcccttactcttggccttgtgttggttatttgtctacatatttattgactggtcgatgagacatgtcacaattcttgggcttatttgttggtctaataaaaggagtgcttattgaaagatcaagacggagattcggttttatataaataaactaaagatgacatattagtgtgttgatgtctcttcaggataatttttgtttgaaataatatggtaatgtcttgtctaaatttgtgtacataattcttactgattttttggattgttggatttttataaacaaatctgcggccgcatgagccgtaaaggttcaatacaacgagtgcttgttttcttagggacaagcattgtacttatgtatgattctgtgtaaccatgagtcttccacgttgtactaatgtgaagggcaaaaataaaacacagaacaagttcgtttttctcaaataatgtgaaggtagaaaatggaaccatgcctcctctcttgcatgtgatttaaaatattagcagatggtacgtcgagtcgacctgcaggagatccaagcttggcgcgccgttctatagtgtcacctaaatcgtatgtgtatgatacataaggttatgtattaattgtagccgcgttctaacgacaatatgtccatatggtgcactctcagtacaatctgctctgatgccgcatagttaagccagccccgacacccgccaacacccgctgacgcgccctgacgggcttgtctgctcccggcatccgcttacagacaagctgtgaccgtctccgggagctgcatgtgtcagaggttttcaccgtcatcaccgaaacgcgcgagacgaaagggcctcgtgatacgcctatttttataggttaatgtcatgaccaaaatcccttaacgtgagttttcgttccactgagcgtcagaccccgtagaaaagatcaaaggatcttcttgagatcctttttttctgcgcgtaatctgctgcttgcaaacaaaaaaaccaccgctaccagcggtggtttgtttgccggatcaagagctaccaactctttttccgaaggtaactggcttcagcagagcgcagataccaaatactgtccttctagtgtagccgtagttaggccaccacttcaagaactctgtagcaccgcctacatacctcgctctgctaatcctgttaccagtggctgctgccagtggcgataagtcgtgtcttaccgggttggactcaagacgatagttaccggataaggcgcagcggtcgggctgaacggggggttcgtgcacacagcccagcttggagcgaacgacctacaccgaactgagatacctacagcgtgagcattgagaaagcgccacgcttcccgaagggagaaaggcggacaggtatccggtaagcggcagggtcggaacaggagagcgcacgagggagcttccagggggaaacgcctggtatctttatagtcctgtcgggtttcgccacctctgacttgagcgtcgatttttgtgatgctcgtcaggggggcggagcctatggaaaaacgccagcaacgcggcctttttacggttcctggccttttgctggccttttgctcacatgttctttcctgcgttatcccctgattctgtggataaccgtattaccgcctttgagtgagctgataccgctcgccgcagccgaacgaccgagcgcagcgagtcagtgagcgaggaagcggaagagcgcccaatacgcaaaccgcctctccccgcgcgttggccgattcattaatgcaggttgatcagatctcgatcccgcgaaattaatacgactcactatagggagaccacaacggtttccctctagaaataattttgtttaactttaagaaggagatatacccatggaaaagcctgaactcaccgcgacgtctgtcgagaagtttctgatcgaaaagttcgacagcgtctccgacctgatgcagctctcggagggcgaagaatctcgtgctttcagcttcgatgtaggagggcgtggatatgtcctgcgggtaaatagctgcgccgatggtttctacaaagatcgttatgtttatcggcactttgcatcggccgcgctcccgattccggaagtgcttgacattggggaattcagcgagagcctgacctattgcatctcccgccgtgcacagggtgtcacgttgcaagacctgcctgaaaccgaactgcccgctgttctgcagccggtcgcggaggctatggatgcgatcgctgcggccgatcttagccagacgagcgggttcggcccattcggaccgcaaggaatcggtcaatacactacatggcgtgatttcatatgcgcgattgctgatccccatgtgtatcactggcaaactgtgatggacgacaccgtcagtgcgtccgtcgcgcaggctctcgatgagctgatgctttgggccgaggactgccccgaagtccggcacctcgtgcacgcggatttcggctccaacaatgtcctgacggacaatggccgcataacagcggtcattgactggagcgaggcgatgttcggggattcccaatacgaggtcgccaacatcttcttctggaggccgtggttggcttgtatggagcagcagacgcgctacttcgagcggaggcatccggagcttgcaggatcgccgcggctccgggcgtatatgctccgcattggtcttgaccaactctatcagagcttggttgacggcaatttcgatgatgcagcttgggcgcagggtcgatgcgacgcaatcgtccgatccggagccgggactgtcgggcgtacacaaatcgcccgcagaagcgcggccgtctggaccgatggctgtgtagaagtactcgccgatagtggaaaccgacgccccagcactcgtccgagggcaaaggaatagtgaggtacagcttggatcgatccggctgctaacaaagcccgaaaggaagctgagttggctgctgccaccgctgagcaataactagcataaccccttggggcctctaaacgggtcttgaggggttttttgctgaaaggaggaactatatccggatgatcgggcgcgccgtcgacggatccgtacgatccatgcccttcatttgccgcttattaattaatttggtaacagtccgtactaatcagttacttatccttcccccatcataattaatcttggtagtctcgaatgccacaacactgactagtctcttggatcataagaaaaagccaaggaacaaaagaagacaaaacacaatgagagtatcctttgcatagcaatgtctaagttcataaaattcaaacaaaaacgcaatcacacacagtggacatcacttatccactagctgatcaggatcgccgcgtcaagaaaaaaaaactggaccccaaaagccatgcacaacaacacgtactcacaaaggtgtcaatcgagcagcccaaaacattcaccaactcaacccatcatgagccctcacatttgttgtttctaacccaacctcaaactcgtattctcttccgccacctcatttttgtttatttcaacacccgtcaaactgcatgccaccccgtggccaaatgtccatgcatgttaacaagacctatgactataaatagctgcaatctcggcccaggttttcatcatcaagaaccagttcaatatcctagtacaccgtattaaagaatttaagatatactgcggccgcatgactatcgactcacaatactacaagtcgcgagacaaaaacgacacggcacccaaaatcgcgggaatccgatatgccccgctatcgacaccattactcaaccgatgtgagaccttctctctggtctggcacattttcagcattcccactttcctcacaattttcatgctatgctgcgcaattccactgctctggccatttgtgattgcgtatgtagtgtacgctgttaaagacgactccccgtccaacggaggagtggtcaagcgatactcgcctatttcaagaaacttcttcatctggaagctctttggccgctacttccccataactctgcacaagacggtggatctggagcccacgcacacatactaccctctggacgtccaggagtatcacctgattgctgagagatactggccgcagaacaagtacctccgagcaatcatcaccaccatcgagtactttctgcccgccttcatgaaacggtctctttctatcaacgagcaggagcagcctgccgagcgagatcctctcctgtctcccgtttctcccagctctccgggttctcaacctgacaagtggattaaccacgacagcagatatagccgtggagaatcatctggctccaacggccacgcctcgggctccgaacttaacggcaacggcaacaacggcaccactaaccgacgacctttgtcgtccgcctctgctggctccactgcatctgattccacgcttcttaacgggtccctcaactcctacgccaaccagatcattggcgaaaacgacccacagctgtcgcccacaaaactcaagcccactggcagaaaatacatcttcggctaccacccccacggcattatcggcatgggagcctttggtggaattgccaccgagggagctggatggtccaagctctttccgggcatccctgtttctcttatgactctcaccaacaacttccgagtgcctctctacagagagtacctcatgagtctgggagtcgcttctgtctccaagaagtcctgcaaggccctcctcaagcgaaaccagtctatctgcattgtcgttggtggagcacaggaaagtcttctggccagacccggtgtcatggacctggtgctactcaagcgaaagggttttgttcgacttggtatggaggtcggaaatgtcgcccttgttcccatcatggcctttggtgagaacgacctctatgaccaggttagcaacgacaagtcgtccaagctgtaccgattccagcagtttgtcaagaacttccttggattcacccttcctttgatgcatgcccgaggcgtcttcaactacgatgtcggtcttgtcccctacaggcgacccgtcaacattgtggttggttcccccattgacttgccttatctcccacaccccaccgacgaagaagtgtccgaataccacgaccgatacatcgccgagctgcagcgaatctacaacgagcacaaggatgaatatttcatcgattggaccgaggagggcaaaggagccccagagttccgaatgattgagtaagcggccgcaagtatgaactaaaatgcatgtaggtgtaagagctcatggagagcatggaatattgtatccgaccatgtaacagtataataactgagctccatctcacttcttctatgaataaacaaaggatgttatgatatattaacactctatctatgcaccttattgttctatgataaatttcctcttattattataaatcatctgaatcgtgacggcttatggaatgcttcaaatagtacaaaaacaaatgtgtactataagactttctaaacaattctaaccttagcattgtgaacgagacataagtgttaagaagacataacaattataatggaagaagtttgtctccatttatatattatatattacccacttatgtattatattaggatgttaaggagacataacaattataaagagagaagtttgtatccatttatatattatatactacccatttatatattatacttatccacttatttaatgtctttataaggtttgatccatgatatttctaatattttagttgatatgtatatgaaaaggtactatttgaactctcttactctgtataaaggttggatcatccttaaagtgggtctatttaattttattgcttcttacagataaaaaaaaaattatgagttggtttgataaaatattgaaggatttaaaataataataaataacatataatatatgtatataaatttattataatataacatttatctataaaaaagtaaatattgtcataaatctatacaatcgtttagccttgctggaacgaatctcaattatttaaacgagagtaaacatatttgactttttggttatttaacaaattattatttaacactatatgaaatttttttttttatcagcaaagaataaaattaaattaagaaggacaatggtgtcccaatccttatacaaccaacttccacaagaaagtcaagtcagagacaacaaaaaaacaagcaaaggaaattttttaatttgagttgtcttgtttgctgcataatttatgcagtaaaacactacacataacccttttagcagtagagcaatggttgaccgtgtgcttagcttcttttattttatttttttatcagcaaagaataaataaaataaaatgagacacttcagggatgtttcaac

SEQ ID NO: 9 - DNA, 5195 bp, artificial sequence
  donor construct QC632
gtgttaacaagcttgcatgcctgcaggtttaaacagtcgaggtcgacggtatcgataagcttgttaacagaagttcctattccgaagttcctattctctagaaagtataggaacttccaccacacaacacaatggcggccaccgcttccagaaccacccgattctcttcttcctcttcacaccccaccttccccaaacgcattactagatccaccctccctctctctcatcaaaccctcaccaaacccaaccacgctctcaaaatcaaatgttccatctccaaaccccccacggcggcgcccttcaccaaggaagcgccgaccacggagcccttcgtgtcacggttcgcctccggcgaacctcgcaagggcgcggacatccttgtggaggcgctggagaggcagggcgtgacgacggtgttcgcgtaccccggcggtgcgtcgatggagatccaccaggcgctcacgcgctccgccgccatccgcaacgtgctcccgcgccacgagcagggcggcgtcttcgccgccgaaggctacgcgcgttcctccggcctccccggcgtctgcattgccacctccggccccggcgccaccaacctcgtgagcggcctcgccgacgctttaatggacagcgtcccagtcgtcgccatcaccggccaggtcgcccgccggatgatcggcaccgacgccttccaagaaaccccgatcgtggaggtgagcagatccatcacgaagcacaactacctcatcctcgacgtcgacgacatcccccgcgtcgtcgccgaggctttcttcgtcgccacctccggccgccccggtccggtcctcatcgacattcccaaagacgttcagcagcaactcgccgtgcctaattgggacgagcccgttaacctccccggttacctcgccaggctgcccaggccccccgccgaggcccaattggaacacattgtcagactcatcatggaggcccaaaagcccgttctctacgtcggcggtggcagtttgaattccagtgctgaattgaggcgctttgttgaactcactggtattcccgttgctagcactttaatgggtcttggaacttttcctattggtgatgaatattcccttcagatgctgggtatgcatggtactgtttatgctaactatgctgttgacaatagtgatttgttgcttgcctttggggtaaggtttgatgaccgtgttactgggaagcttgaggcttttgctagtagggctaagattgttcacattgatattgattctgccgagattgggaagaacaagcaggcgcacgtgtcggtttgcgcggatttgaagttggccttgaagggaattaatatgattttggaggagaaaggagtggagggtaagtttgatcttggaggttggagagaagagattaatgtgcagaaacacaagtttccattgggttacaagacattccaggacgcgatttctccgcagcatgctatcgaggttcttgatgagttgactaatggagatgctattgttagtactggggttgggcagcatcaaatgtgggctgcgcagttttacaagtacaagagaccgaggcagtggttgacctcagggggtcttggagccatgggttttggattgcctgcggctattggtgctgctgttgctaaccctggggctgttgtggttgacattgatggggatggtagtttcatcatgaatgttcaggagttggccactataagagtggagaatctcccagttaagatattgttgttgaacaatcagcatttgggtatggtggttcagtgggaggataggttctacaagtccaatagagctcacacctatcttggagatccgtctagcgagagcgagatattcccaaacatgctcaagtttgctgatgcttgtgggataccggcagcgcgagtgacgaagaaggaagagcttagagcggcaattcagagaatgttggacacccctggcccctaccttcttgatgtcattgtgccccatcaggagcatgtgttgccgatgattcccagtaatggatccttcaaggatgtgataactgagggtgatggtagaacgaggtactgactagctagtcagttaacctagacttgtccatcttctggattggccaacttaattaatgtatgaaataaaaggatgcacacatagtgacatgctaatcactataatgtgggcatcaaagttgtgtgttatgtgtaattactagttatctgaataaaagagaaagagatcatccatatttcttatcctaaatgaatgtcacgtgtctttataattctttgatgaaccagatgcatttcattaaccaaatccatatacatataaatattaatcatatataattaatatcaattgggttagcaaaacaaatctagtctaggtgtgttttgcccccaagcttatcgataccgtcggcgcggggtacccgggccctaggaggccggcccgaagttcctattccgaagttcctattcttcaaaaagtataggaacttccgatatcacttaagtggcgcgccggatccttaattaagtctagagtcgactgtttaattctagtggccggcccagctgatgatcccggtgaagttcctattccgaagttcctattctccagaaagtataggaacttcactagagcttgcggccgctcgagttctatagtgtcacctaaatcgtatgtgtatgatacataaggttatgtattaattgtagccgcgttctaacgacaatatgtccatatggtgcactctcagtacaatctgctctgatgccgcatagttaagccagccccgacacccgccaacacccgctgacgcgccctgacgggcttgtctgctcccggcatccgcttacagacaagctgtgaccgtctccgggagctgcatgtgtcagaggttttcaccgtcatcaccgaaacgcgcgagacgaaagggcctcgtgatacgcctatttttataggttaatgtcatgaccaaaatcccttaacgtgagttttcgttccactgagcgtcagaccccgtagaaaagatcaaaggatcttcttgagatcctttttttctgcgcgtaatctgctgcttgcaaacaaaaaaaccaccgctaccagcggtggtttgtttgccggatcaagagctaccaactctttttccgaaggtaactggcttcagcagagcgcagataccaaatactgtccttctagtgtagccgtagttaggccaccacttcaagaactctgtagcaccgcctacatacctcgctctgctaatcctgttaccagtggctgctgccagtggcgataagtcgtgtcttaccgggttggactcaagacgatagttaccggataaggcgcagcggtcgggctgaacggggggttcgtgcacacagcccagcttggagcgaacgacctacaccgaactgagatacctacagcgtgagcattgagaaagcgccacgcttcccgaagggagaaaggcggacaggtatccggtaagcggcagggtcggaacaggagagcgcacgagggagcttccagggggaaacgcctggtatctttatagtcctgtcgggtttcgccacctctgacttgagcgtcgatttttgtgatgctcgtcaggggggcggagcctatggaaaaacgccagcaacgcggcctttttacggttcctggccttttgctggccttttgctcacatgttctttcctgcgttatcccctgattctgtggataaccgtattaccgcctttgagtgagctgataccgctcgccgcagccgaacgaccgagcgcagcgagtcagtgagcgaggaagcggaagagcgcccaatacgcaaaccgcctctccccgcgcgttggccgattcattaatgcaggttgatcagatctcgatcccgcgaaattaatacgactcactatagggagaccacaacggtttccctctagaaataattttgtttaactttaagaaggagatatacccatggaaaagcctgaactcaccgcgacgtctgtcgagaagtttctgatcgaaaagttcgacagcgtctccgacctgatgcagctctcggagggcgaagaatctcgtgctttcagcttcgatgtaggagggcgtggatatgtcctgcgggtaaatagctgcgccgatggtttctacaaagatcgttatgtttatcggcactttgcatcggccgcgctcccgattccggaagtgcttgacattggggaattcagcgagagcctgacctattgcatctcccgccgtgcacagggtgtcacgttgcaagacctgcctgaaaccgaactgcccgctgttctgcagccggtcgcggaggctatggatgcgatcgctgcggccgatcttagccagacgagcgggttcggcccattcggaccgcaaggaatcggtcaatacactacatggcgtgatttcatatgcgcgattgctgatccccatgtgtatcactggcaaactgtgatggacgacaccgtcagtgcgtccgtcgcgcaggctctcgatgagctgatgctttgggccgaggactgccccgaagtccggcacctcgtgcacgcggatttcggctccaacaatgtcctgacggacaatggccgcataacagcggtcattgactggagcgaggcgatgttcggggattcccaatacgaggtcgccaacatcttcttctggaggccgtggttggcttgtatggagcagcagacgcgctacttcgagcggaggcatccggagcttgcaggatcgccgcggctccgggcgtatatgctccgcattggtcttgaccaactctatcagagcttggttgacggcaatttcgatgatgcagcttgggcgcagggtcgatgcgacgcaatcgtccgatccggagccgggactgtcgggcgtacacaaatcgcccgcagaagcgcggccgtctggaccgatggctgtgtagaagtactcgccgatagtggaaaccgacgccccagcactcgtccgagggcaaaggaatagtgaggtacagcttggatcgatccggctgctaacaaagcccgaaaggaagctgagttggctgctgccaccgctgagcaataactagcataaccccttggggcctctaaacgggtcttgaggggttttttgctgaaaggaggaactatatccggatgatcgtcgaggcctcac

SEQ ID NO: 10 - DNA, 318 bp, artificial sequence
  PINII terminator
agacttgtccatcttctggattggccaacttaattaatgtatgaaataaaaggatgcacacatagtgacatgctaatcactataatgtgggcatcaaagttgtgtgttatgtgtaattactagttatctgaataaaagagaaagagatcatccatatttcttatcctaaatgaatgtcacgtgtctttataattctttgatgaaccagatgcatttcattaaccaaatccatatacatataaatattaatcatatataattaatatcaattgggttagcaaaacaaatctagtctaggtgtgttttgcgaattgcggc

SEQ ID NO: 11 - DNA, 5123 bp, artificial sequence
  pKR1763
atcacttaagtggcgcgccggatccttaattaagtctagagtcgactgtttaattctagtggccggcccagctgatgatcccggtgaagttcctattccgaagttcctattctccagaaagtataggaacttcactagagcttgcggccgctcgagttctatagtgtcacctaaatcgtatgtgtatgatacataaggttatgtattaattgtagccgcgttctaacgacaatatgtccatatggtgcactctcagtacaatctgctctgatgccgcatagttaagccagccccgacacccgccaacacccgctgacgcgccctgacgggcttgtctgctcccggcatccgcttacagacaagctgtgaccgtctccgggagctgcatgtgtcagaggttttcaccgtcatcaccgaaacgcgcgagacgaaagggcctcgtgatacgcctatttttataggttaatgtcatgaccaaaatcccttaacgtgagttttcgttccactgagcgtcagaccccgtagaaaagatcaaaggatcttcttgagatcctttttttctgcgcgtaatctgctgcttgcaaacaaaaaaaccaccgctaccagcggtggtttgtttgccggatcaagagctaccaactctttttccgaaggtaactggcttcagcagagcgcagataccaaatactgtccttctagtgtagccgtagttaggccaccacttcaagaactctgtagcaccgcctacatacctcgctctgctaatcctgttaccagtggctgctgccagtggcgataagtcgtgtcttaccgggttggactcaagacgatagttaccggataaggcgcagcggtcgggctgaacggggggttcgtgcacacagcccagcttggagcgaacgacctacaccgaactgagatacctacagcgtgagcattgagaaagcgccacgcttcccgaagggagaaaggcggacaggtatccggtaagcggcagggtcggaacaggagagcgcacgagggagcttccagggggaaacgcctggtatctttatagtcctgtcgggtttcgccacctctgacttgagcgtcgatttttgtgatgctcgtcaggggggcggagcctatggaaaaacgccagcaacgcggcctttttacggttcctggccttttgctggccttttgctcacatgttctttcctgcgttatcccctgattctgtggataaccgtattaccgcctttgagtgagctgataccgctcgccgcagccgaacgaccgagcgcagcgagtcagtgagcgaggaagcggaagagcgcccaatacgcaaaccgcctctccccgcgcgttggccgattcattaatgcaggttgatcagatctcgatcccgcgaaattaatacgactcactatagggagaccacaacggtttccctctagaaataattttgtttaactttaagaaggagatatacccatggaaaagcctgaactcaccgcgacgtctgtcgagaagtttctgatcgaaaagttcgacagcgtctccgacctgatgcagctctcggagggcgaagaatctcgtgctttcagcttcgatgtaggagggcgtggatatgtcctgcgggtaaatagctgcgccgatggtttctacaaagatcgttatgtttatcggcactttgcatcggccgcgctcccgattccggaagtgcttgacattggggaattcagcgagagcctgacctattgcatctcccgccgtgcacagggtgtcacgttgcaagacctgcctgaaaccgaactgcccgctgttctgcagccggtcgcggaggctatggatgcgatcgctgcggccgatcttagccagacgagcgggttcggcccattcggaccgcaaggaatcggtcaatacactacatggcgtgatttcatatgcgcgattgctgatccccatgtgtatcactggcaaactgtgatggacgacaccgtcagtgcgtccgtcgcgcaggctctcgatgagctgatgctttgggccgaggactgccccgaagtccggcacctcgtgcacgcggatttcggctccaacaatgtcctgacggacaatggccgcataacagcggtcattgactggagcgaggcgatgttcggggattcccaatacgaggtcgccaacatcttcttctggaggccgtggttggcttgtatggagcagcagacgcgctacttcgagcggaggcatccggagcttgcaggatcgccgcggctccgggcgtatatgctccgcattggtcttgaccaactctatcagagcttggttgacggcaatttcgatgatgcagcttgggcgcagggtcgatgcgacgcaatcgtccgatccggagccgggactgtcgggcgtacacaaatcgcccgcagaagcgcggccgtctggaccgatggctgtgtagaagtactcgccgatagtggaaaccgacgccccagcactcgtccgagggcaaaggaatagtgaggtacagcttggatcgatccggctgctaacaaagcccgaaaggaagctgagttggctgctgccaccgctgagcaataactagcataaccccttggggcctctaaacgggtcttgaggggttttttgctgaaaggaggaactatatccggatgatcgtcgaggcctcacgtgttaacaagcttgcatgcctgcaggtttaaacagtcgaggtcgacggtatcgataagcttgttaacagaagttcctattccgaagttcctattctctagaaagtataggaacttccaccacacaacacaatggcggccaccgcttccagaaccacccgattctcttcttcctcttcacaccccaccttccccaaacgcattactagatccaccctccctctctctcatcaaaccctcaccaaacccaaccacgctctcaaaatcaaatgttccatctccaaaccccccacggcggcgcccttcaccaaggaagcgccgaccacggagcccttcgtgtcacggttcgcctccggcgaacctcgcaagggcgcggacatccttgtggaggcgctggagaggcagggcgtgacgacggtgttcgcgtaccccggcggtgcgtcgatggagatccaccaggcgctcacgcgctccgccgccatccgcaacgtgctcccgcgccacgagcagggcggcgtcttcgccgccgaaggctacgcgcgttcctccggcctccccggcgtctgcattgccacctccggccccggcgccaccaacctcgtgagcggcctcgccgacgctttaatggacagcgtcccagtcgtcgccatcaccggccaggtcgcccgccggatgatcggcaccgacgccttccaagaaaccccgatcgtggaggtgagcagatccatcacgaagcacaactacctcatcctcgacgtcgacgacatcccccgcgtcgtcgccgaggctttcttcgtcgccacctccggccgccccggtccggtcctcatcgacattcccaaagacgttcagcagcaactcgccgtgcctaattgggacgagcccgttaacctccccggttacctcgccaggctgcccaggccccccgccgaggcccaattggaacacattgtcagactcatcatggaggcccaaaagcccgttctctacgtcggcggtggcagtttgaattccagtgctgaattgaggcgctttgttgaactcactggtattcccgttgctagcactttaatgggtcttggaacttttcctattggtgatgaatattcccttcagatgctgggtatgcatggtactgtttatgctaactatgctgttgacaatagtgatttgttgcttgcctttggggtaaggtttgatgaccgtgttactgggaagcttgaggcttttgctagtagggctaagattgttcacattgatattgattctgccgagattgggaagaacaagcaggcgcacgtgtcggtttgcgcggatttgaagttggccttgaagggaattaatatgattttggaggagaaaggagtggagggtaagtttgatcttggaggttggagagaagagattaatgtgcagaaacacaagtttccattgggttacaagacattccaggacgcgatttctccgcagcatgctatcgaggttcttgatgagttgactaatggagatgctattgttagtactggggttgggcagcatcaaatgtgggctgcgcagttttacaagtacaagagaccgaggcagtggttgacctcagggggtcttggagccatgggttttggattgcctgcggctattggtgctgctgttgctaaccctggggctgttgtggttgacattgatggggatggtagtttcatcatgaatgttcaggagttggccactataagagtggagaatctcccagttaagatattgttgttgaacaatcagcatttgggtatggtggttcagtgggaggataggttctacaagtccaatagagctcacacctatcttggagatccgtctagcgagagcgagatattcccaaacatgctcaagtttgctgatgcttgtgggataccggcagcgcgagtgacgaagaaggaagagcttagagcggcaattcagagaatgttggacacccctggcccctaccttcttgatgtcattgtgccccatcaggagcatgtgttgccgatgattcccagtaatggatccttcaaggatgtgataactgagggtgatggtagaacgaggtactgactagctagtcagttaacctagacttgtccatcttctggattggccaacttaattaatgtatgaaataaaaggatgcacacatagtgacatgctaatcactataatgtgggcatcaaagttgtgtgttatgtgtaattactagttatctgaataaaagagaaagagatcatccatatttcttatcctaaatgaatgtcacgtgtctttataattctttgatgaaccagatgcatttcattaaccaaatccatatacatataaatattaatcatatataattaatatcaattgggttagcaaaacaaatctagtctaggtgtgttttgcccccaagcttatcgataccgtcggcgcggggtaccc

SEQ ID NO: 12 - DNA, 6345 bp, artificial sequence
  DNA fragment of the 3'transcription terminator region of the phaseolin gene with flanking ORFstop sequences (ORF stop A/stopB)
cgcgccggatccttaattaagtctagagtcgactgtttaattctagtggccggcccagctgatgatcccggtgaagttcctattccgaagttcctattctccagaaagtataggaacttcactagagcttgcggccgctcgagttctatagtgtcacctaaatcgtatgtgtatgatacataaggttatgtattaattgtagccgcgttctaacgacaatatgtccatatggtgcactctcagtacaatctgctctgatgccgcatagttaagccagccccgacacccgccaacacccgctgacgcgccctgacgggcttgtctgctcccggcatccgcttacagacaagctgtgaccgtctccgggagctgcatgtgtcagaggttttcaccgtcatcaccgaaacgcgcgagacgaaagggcctcgtgatacgcctatttttataggttaatgtcatgaccaaaatcccttaacgtgagttttcgttccactgagcgtcagaccccgtagaaaagatcaaaggatcttcttgagatcctttttttctgcgcgtaatctgctgcttgcaaacaaaaaaaccaccgctaccagcggtggtttgtttgccggatcaagagctaccaactctttttccgaaggtaactggcttcagcagagcgcagataccaaatactgtccttctagtgtagccgtagttaggccaccacttcaagaactctgtagcaccgcctacatacctcgctctgctaatcctgttaccagtggctgctgccagtggcgataagtcgtgtcttaccgggttggactcaagacgatagttaccggataaggcgcagcggtcgggctgaacggggggttcgtgcacacagcccagcttggagcgaacgacctacaccgaactgagatacctacagcgtgagcattgagaaagcgccacgcttcccgaagggagaaaggcggacaggtatccggtaagcggcagggtcggaacaggagagcgcacgagggagcttccagggggaaacgcctggtatctttatagtcctgtcgggtttcgccacctctgacttgagcgtcgatttttgtgatgctcgtcaggggggcggagcctatggaaaaacgccagcaacgcggcctttttacggttcctggccttttgctggccttttgctcacatgttctttcctgcgttatcccctgattctgtggataaccgtattaccgcctttgagtgagctgataccgctcgccgcagccgaacgaccgagcgcagcgagtcagtgagcgaggaagcggaagagcgcccaatacgcaaaccgcctctccccgcgcgttggccgattcattaatgcaggttgatcagatctcgatcccgcgaaattaatacgactcactatagggagaccacaacggtttccctctagaaataattttgtttaactttaagaaggagatatacccatggaaaagcctgaactcaccgcgacgtctgtcgagaagtttctgatcgaaaagttcgacagcgtctccgacctgatgcagctctcggagggcgaagaatctcgtgctttcagcttcgatgtaggagggcgtggatatgtcctgcgggtaaatagctgcgccgatggtttctacaaagatcgttatgtttatcggcactttgcatcggccgcgctcccgattccggaagtgcttgacattggggaattcagcgagagcctgacctattgcatctcccgccgtgcacagggtgtcacgttgcaagacctgcctgaaaccgaactgcccgctgttctgcagccggtcgcggaggctatggatgcgatcgctgcggccgatcttagccagacgagcgggttcggcccattcggaccgcaaggaatcggtcaatacactacatggcgtgatttcatatgcgcgattgctgatccccatgtgtatcactggcaaactgtgatggacgacaccgtcagtgcgtccgtcgcgcaggctctcgatgagctgatgctttgggccgaggactgccccgaagtccggcacctcgtgcacgcggatttcggctccaacaatgtcctgacggacaatggccgcataacagcggtcattgactggagcgaggcgatgttcggggattcccaatacgaggtcgccaacatcttcttctggaggccgtggttggcttgtatggagcagcagacgcgctacttcgagcggaggcatccggagcttgcaggatcgccgcggctccgggcgtatatgctccgcattggtcttgaccaactctatcagagcttggttgacggcaatttcgatgatgcagcttgggcgcagggtcgatgcgacgcaatcgtccgatccggagccgggactgtcgggcgtacacaaatcgcccgcagaagcgcggccgtctggaccgatggctgtgtagaagtactcgccgatagtggaaaccgacgccccagcactcgtccgagggcaaaggaatagtgaggtacagcttggatcgatccggctgctaacaaagcccgaaaggaagctgagttggctgctgccaccgctgagcaataactagcataaccccttggggcctctaaacgggtcttgaggggttttttgctgaaaggaggaactatatccggatgatcgtcgaggcctcacgtgttaacaagcttgcatgcctgcaggtttaaacagtcgaggtcgacggtatcgataagcttgttaacagaagttcctattccgaagttcctattctctagaaagtataggaacttccaccacacaacacaatggcggccaccgcttccagaaccacccgattctcttcttcctcttcacaccccaccttccccaaacgcattactagatccaccctccctctctctcatcaaaccctcaccaaacccaaccacgctctcaaaatcaaatgttccatctccaaaccccccacggcggcgcccttcaccaaggaagcgccgaccacggagcccttcgtgtcacggttcgcctccggcgaacctcgcaagggcgcggacatccttgtggaggcgctggagaggcagggcgtgacgacggtgttcgcgtaccccggcggtgcgtcgatggagatccaccaggcgctcacgcgctccgccgccatccgcaacgtgctcccgcgccacgagcagggcggcgtcttcgccgccgaaggctacgcgcgttcctccggcctccccggcgtctgcattgccacctccggccccggcgccaccaacctcgtgagcggcctcgccgacgctttaatggacagcgtcccagtcgtcgccatcaccggccaggtcgcccgccggatgatcggcaccgacgccttccaagaaaccccgatcgtggaggtgagcagatccatcacgaagcacaactacctcatcctcgacgtcgacgacatcccccgcgtcgtcgccgaggctttcttcgtcgccacctccggccgccccggtccggtcctcatcgacattcccaaagacgttcagcagcaactcgccgtgcctaattgggacgagcccgttaacctccccggttacctcgccaggctgcccaggccccccgccgaggcccaattggaacacattgtcagactcatcatggaggcccaaaagcccgttctctacgtcggcggtggcagtttgaattccagtgctgaattgaggcgctttgttgaactcactggtattcccgttgctagcactttaatgggtcttggaacttttcctattggtgatgaatattcccttcagatgctgggtatgcatggtactgtttatgctaactatgctgttgacaatagtgatttgttgcttgcctttggggtaaggtttgatgaccgtgttactgggaagcttgaggcttttgctagtagggctaagattgttcacattgatattgattctgccgagattgggaagaacaagcaggcgcacgtgtcggtttgcgcggatttgaagttggccttgaagggaattaatatgattttggaggagaaaggagtggagggtaagtttgatcttggaggttggagagaagagattaatgtgcagaaacacaagtttccattgggttacaagacattccaggacgcgatttctccgcagcatgctatcgaggttcttgatgagttgactaatggagatgctattgttagtactggggttgggcagcatcaaatgtgggctgcgcagttttacaagtacaagagaccgaggcagtggttgacctcagggggtcttggagccatgggttttggattgcctgcggctattggtgctgctgttgctaaccctggggctgttgtggttgacattgatggggatggtagtttcatcatgaatgttcaggagttggccactataagagtggagaatctcccagttaagatattgttgttgaacaatcagcatttgggtatggtggttcagtgggaggataggttctacaagtccaatagagctcacacctatcttggagatccgtctagcgagagcgagatattcccaaacatgctcaagtttgctgatgcttgtgggataccggcagcgcgagtgacgaagaaggaagagcttagagcggcaattcagagaatgttggacacccctggcccctaccttcttgatgtcattgtgccccatcaggagcatgtgttgccgatgattcccagtaatggatccttcaaggatgtgataactgagggtgatggtagaacgaggtactgactagctagtcagttaacctagacttgtccatcttctggattggccaacttaattaatgtatgaaataaaaggatgcacacatagtgacatgctaatcactataatgtgggcatcaaagttgtgtgttatgtgtaattactagttatctgaataaaagagaaagagatcatccatatttcttatcctaaatgaatgtcacgtgtctttataattctttgatgaaccagatgcatttcattaaccaaatccatatacatataaatattaatcatatataattaatatcaattgggttagcaaaacaaatctagtctaggtgtgttttgcccccaagcttatcgataccgtcggcgcggggtacgttagctgattaagtcagcatgcgcggccggcgtatgaactaaaatgcatgtaggtgtaagagctcatggagagcatggaatattgtatccgaccatgtaacagtataataactgagctccatctcacttcttctatgaataaacaaaggatgttatgatatattaacactctatctatgcaccttattgttctatgataaatttcctcttattattataaatcatctgaatcgtgacggcttatggaatgcttcaaatagtacaaaaacaaatgtgtactataagactttctaaacaattctaaccttagcattgtgaacgagacataagtgttaagaagacataacaattataatggaagaagtttgtctccatttatatattatatattacccacttatgtattatattaggatgttaaggagacataacaattataaagagagaagtttgtatccatttatatattatatactacccatttatatattatacttatccacttatttaatgtctttataaggtttgatccatgatatttctaatattttagttgatatgtatatgaaaaggtactatttgaactctcttactctgtataaaggttggatcatccttaaagtgggtctatttaattttattgcttcttacagataaaaaaaaaattatgagttggtttgataaaatattgaaggatttaaaataataataaataacatataatatatgtatataaatttattataatataacatttatctataaaaaagtaaatattgtcataaatctatacaatcgtttagccttgctggaacgaatctcaattatttaaacgagagtaaacatatttgactttttggttatttaacaaattattatttaacactatatgaaatttttttttttatcagcaaagaataaaattaaattaagaaggacaatggtgtcccaatccttatacaaccaacttccacaagaaagtcaagtcagagacaacaaaaaaacaagcaaaggaaattttttaatttgagttgtcttgtttgctgcataatttatgcagtaaaacactacacataacccttttagcagtagagcaatggttgaccgtgtgcttagcttcttttattttatttttttatcagcaaagaataaataaaataaaatgagacacttcagggatgtttcaacaggtacccatcacttaagtggcgcgccggaattaattaggtaatttca

SEQ ID NO: 13 - DNA, 6345 bp, artificial sequence; identical to SEQ ID NO: 12
  plasmid pKR1849

SEQ ID NO: 14 - DNA, 6341 bp, artificial sequence
  plasmid-pKR1857
ggtttaaacagtcgaggtcgacggtatcgataagcttgttaacagaagttcctattccgaagttcctattctctagaaagtataggaacttccaccacacaacacaatggcggccaccgcttccagaaccacccgattctcttcttcctcttcacaccccaccttccccaaacgcattactagatccaccctccctctctctcatcaaaccctcaccaaacccaaccacgctctcaaaatcaaatgttccatctccaaaccccccacggcggcgcccttcaccaaggaagcgccgaccacggagcccttcgtgtcacggttcgcctccggcgaacctcgcaagggcgcggacatccttgtggaggcgctggagaggcagggcgtgacgacggtgttcgcgtaccccggcggtgcgtcgatggagatccaccaggcgctcacgcgctccgccgccatccgcaacgtgctcccgcgccacgagcagggcggcgtcttcgccgccgaaggctacgcgcgttcctccggcctccccggcgtctgcattgccacctccggccccggcgccaccaacctcgtgagcggcctcgccgacgctttaatggacagcgtcccagtcgtcgccatcaccggccaggtcgcccgccggatgatcggcaccgacgccttccaagaaaccccgatcgtggaggtgagcagatccatcacgaagcacaactacctcatcctcgacgtcgacgacatcccccgcgtcgtcgccgaggctttcttcgtcgccacctccggccgccccggtccggtcctcatcgacattcccaaagacgttcagcagcaactcgccgtgcctaattgggacgagcccgttaacctccccggttacctcgccaggctgcccaggccccccgccgaggcccaattggaacacattgtcagactcatcatggaggcccaaaagcccgttctctacgtcggcggtggcagtttgaattccagtgctgaattgaggcgctttgttgaactcactggtattcccgttgctagcactttaatgggtcttggaacttttcctattggtgatgaatattcccttcagatgctgggtatgcatggtactgtttatgctaactatgctgttgacaatagtgatttgttgcttgcctttggggtaaggtttgatgaccgtgttactgggaagcttgaggcttttgctagtagggctaagattgttcacattgatattgattctgccgagattgggaagaacaagcaggcgcacgtgtcggtttgcgcggatttgaagttggccttgaagggaattaatatgattttggaggagaaaggagtggagggtaagtttgatcttggaggttggagagaagagattaatgtgcagaaacacaagtttccattgggttacaagacattccaggacgcgatttctccgcagcatgctatcgaggttcttgatgagttgactaatggagatgctattgttagtactggggttgggcagcatcaaatgtgggctgcgcagttttacaagtacaagagaccgaggcagtggttgacctcagggggtcttggagccatgggttttggattgcctgcggctattggtgctgctgttgctaaccctggggctgttgtggttgacattgatggggatggtagtttcatcatgaatgttcaggagttggccactataagagtggagaatctcccagttaagatattgttgttgaacaatcagcatttgggtatggtggttcagtgggaggataggttctacaagtccaatagagctcacacctatcttggagatccgtctagcgagagcgagatattcccaaacatgctcaagtttgctgatgcttgtgggataccggcagcgcgagtgacgaagaaggaagagcttagagcggcaattcagagaatgttggacacccctggcccctaccttcttgatgtcattgtgccccatcaggagcatgtgttgccgatgattcccagtaatggatccttcaaggatgtgataactgagggtgatggtagaacgaggtactgactagctagtcagttaacctagacttgtccatcttctggattggccaacttaattaatgtatgaaataaaaggatgcacacatagtgacatgctaatcactataatgtgggcatcaaagttgtgtgttatgtgtaattactagttatctgaataaaagagaaagagatcatccatatttcttatcctaaatgaatgtcacgtgtctttataattctttgatgaaccagatgcatttcattaaccaaatccatatacatataaatattaatcatatataattaatatcaattgggttagcaaaacaaatctagtctaggtgtgttttgcccccaagcttatcgataccgtcggcgcggggtacgttagctgattaagtcagcatgcgcggccggcgtatgaactaaaatgcatgtaggtgtaagagctcatggagagcatggaatattgtatccgaccatgtaacagtataataactgagctccatctcacttcttctatgaataaacaaaggatgttatgatatattaacactctatctatgcaccttattgttctatgataaatttcctcttattattataaatcatctgaatcgtgacggcttatggaatgcttcaaatagtacaaaaacaaatgtgtactataagactttctaaacaattctaaccttagcattgtgaacgagacataagtgttaagaagacataacaattataatggaagaagtttgtctccatttatatattatatattacccacttatgtattatattaggatgttaaggagacataacaattataaagagagaagtttgtatccatttatatattatatactacccatttatatattatacttatccacttatttaatgtctttataaggtttgatccatgatatttctaatattttagttgatatgtatatgaaaaggtactatttgaactctcttactctgtataaaggttggatcatccttaaagtgggtctatttaattttattgcttcttacagataaaaaaaaaattatgagttggtttgataaaatattgaaggatttaaaataataataaataacatataatatatgtatataaatttattataatataacatttatctataaaaaagtaaatattgtcataaatctatacaatcgtttagccttgctggaacgaatctcaattatttaaacgagagtaaacatatttgactttttggttatttaacaaattattatttaacactatatgaaatttttttttttatcagcaaagaataaaattaaattaagaaggacaatggtgtcccaatccttatacaaccaacttccacaagaaagtcaagtcagagacaacaaaaaaacaagcaaaggaaattttttaatttgagttgtcttgtttgctgcataatttatgcagtaaaacactacacataacccttttagcagtagagcaatggttgaccgtgtgcttagcttcttttattttatttttttatcagcaaagaataaataaaataaaatgagacacttcagggatgtttcaacaggtacccatcacttaagtggcgcgccggaattaattaggtaatttcacgcgccggatccttaattaagtctagagtcgactgtttaattctagtggccggcccagctgatgatcccggtgaagttcctattccgaagttcctattctccagaaagtataggaacttcactagagcttgcggccgctcgagttctatagtgtcacctaaatcgtatgtgtatgatacataaggttatgtattaattgtagccgcgttctaacgacaatatgtccatatggtgcactctcagtacaatctgctctgatgccgcatagttaagccagccccgacacccgccaacacccgctgacgcgccctgacgggcttgtctgctcccggcatccgcttacagacaagctgtgaccgtctccgggagctgcatgtgtcagaggttttcaccgtcatcaccgaaacgcgcgagacgaaagggcctcgtgatacgcctatttttataggttaatgtcatgaccaaaatcccttaacgtgagttttcgttccactgagcgtcagaccccgtagaaaagatcaaaggatcttcttgagatcctttttttctgcgcgtaatctgctgcttgcaaacaaaaaaaccaccgctaccagcggtggtttgtttgccggatcaagagctaccaactctttttccgaaggtaactggcttcagcagagcgcagataccaaatactgtccttctagtgtagccgtagttaggccaccacttcaagaactctgtagcaccgcctacatacctcgctctgctaatcctgttaccagtggctgctgccagtggcgataagtcgtgtcttaccgggttggactcaagacgatagttaccggataaggcgcagcggtcgggctgaacggggggttcgtgcacacagcccagcttggagcgaacgacctacaccgaactgagatacctacagcgtgagcattgagaaagcgccacgcttcccgaagggagaaaggcggacaggtatccggtaagcggcagggtcggaacaggagagcgcacgagggagcttccagggggaaacgcctggtatctttatagtcctgtcgggtttcgccacctctgacttgagcgtcgatttttgtgatgctcgtcaggggggcggagcctatggaaaaacgccagcaacgcggcctttttacggttcctggccttttgctggccttttgctcacatgttctttcctgcgttatcccctgattctgtggataaccgtattaccgcctttgagtgagctgataccgctcgccgcagccgaacgaccgagcgcagcgagtcagtgagcgaggaagcggaagagcgcccaatacgcaaaccgcctctccccgcgcgttggccgattcattaatgcaggttgatcagatctcgatcccgcgaaattaatacgactcactatagggagaccacaacggtttccctctagaaataattttgtttaactttaagaaggagatatacccatggaaaagcctgaactcaccgcgacgtctgtcgagaagtttctgatcgaaaagttcgacagcgtctccgacctgatgcagctctcggagggcgaagaatctcgtgctttcagcttcgatgtaggagggcgtggatatgtcctgcgggtaaatagctgcgccgatggtttctacaaagatcgttatgtttatcggcactttgcatcggccgcgctcccgattccggaagtgcttgacattggggaattcagcgagagcctgacctattgcatctcccgccgtgcacagggtgtcacgttgcaagacctgcctgaaaccgaactgcccgctgttctgcagccggtcgcggaggctatggatgcgatcgctgcggccgatcttagccagacgagcgggttcggcccattcggaccgcaaggaatcggtcaatacactacatggcgtgatttcatatgcgcgattgctgatccccatgtgtatcactggcaaactgtgatggacgacaccgtcagtgcgtccgtcgcgcaggctctcgatgagctgatgctttgggccgaggactgccccgaagtccggcacctcgtgcacgcggatttcggctccaacaatgtcctgacggacaatggccgcataacagcggtcattgactggagcgaggcgatgttcggggattcccaatacgaggtcgccaacatcttcttctggaggccgtggttggcttgtatggagcagcagacgcgctacttcgagcggaggcatccggagcttgcaggatcgccgcggctccgggcgtatatgctccgcattggtcttgaccaactctatcagagcttggttgacggcaatttcgatgatgcagcttgggcgcagggtcgatgcgacgcaatcgtccgatccggagccgggactgtcgggcgtacacaaatcgcccgcagaagcgcggccgtctggaccgatggctgtgtagaagtactcgccgatagtggaaaccgacgccccagcactcgtccgagggcaaaggaatagtgaggtacagcttggatcgatccggctgctaacaaagcccgaaaggaagctgagttggctgctgccaccgctgagcaataactagcataaccccttggggcctctaaacgggtcttgaggggttttttgctgaaaggaggaactatatccggatgatcgtcgaggcctcacgtgttaacaagcttgcatgcc

SEQ ID NO: 15 - DNA, 11690 bp, artificial sequence
  plasmid-pKR1980
cgcgccggaattaattaggtaatttcacgcgccggatccttaattaagtctagagtcgactgtttaattctagtggccggcccagctgatgatcccggtgaagttcctattccgaagttcctattctccagaaagtataggaacttcactagagcttgcggccgctcgagttctatagtgtcacctaaatcgtatgtgtatgatacataaggttatgtattaattgtagccgcgttctaacgacaatatgtccatatggtgcactctcagtacaatctgctctgatgccgcatagttaagccagccccgacacccgccaacacccgctgacgcgccctgacgggcttgtctgctcccggcatccgcttacagacaagctgtgaccgtctccgggagctgcatgtgtcagaggttttcaccgtcatcaccgaaacgcgcgagacgaaagggcctcgtgatacgcctatttttataggttaatgtcatgaccaaaatcccttaacgtgagttttcgttccactgagcgtcagaccccgtagaaaagatcaaaggatcttcttgagatcctttttttctgcgcgtaatctgctgcttgcaaacaaaaaaaccaccgctaccagcggtggtttgtttgccggatcaagagctaccaactctttttccgaaggtaactggcttcagcagagcgcagataccaaatactgtccttctagtgtagccgtagttaggccaccacttcaagaactctgtagcaccgcctacatacctcgctctgctaatcctgttaccagtggctgctgccagtggcgataagtcgtgtcttaccgggttggactcaagacgatagttaccggataaggcgcagcggtcgggctgaacggggggttcgtgcacacagcccagcttggagcgaacgacctacaccgaactgagatacctacagcgtgagcattgagaaagcgccacgcttcccgaagggagaaaggcggacaggtatccggtaagcggcagggtcggaacaggagagcgcacgagggagcttccagggggaaacgcctggtatctttatagtcctgtcgggtttcgccacctctgacttgagcgtcgatttttgtgatgctcgtcaggggggcggagcctatggaaaaacgccagcaacgcggcctttttacggttcctggccttttgctggccttttgctcacatgttctttcctgcgttatcccctgattctgtggataaccgtattaccgcctttgagtgagctgataccgctcgccgcagccgaacgaccgagcgcagcgagtcagtgagcgaggaagcggaagagcgcccaatacgcaaaccgcctctccccgcgcgttggccgattcattaatgcaggttgatcagatctcgatcccgcgaaattaatacgactcactatagggagaccacaacggtttccctctagaaataattttgtttaactttaagaaggagatatacccatggaaaagcctgaactcaccgcgacgtctgtcgagaagtttctgatcgaaaagttcgacagcgtctccgacctgatgcagctctcggagggcgaagaatctcgtgctttcagcttcgatgtaggagggcgtggatatgtcctgcgggtaaatagctgcgccgatggtttctacaaagatcgttatgtttatcggcactttgcatcggccgcgctcccgattccggaagtgcttgacattggggaattcagcgagagcctgacctattgcatctcccgccgtgcacagggtgtcacgttgcaagacctgcctgaaaccgaactgcccgctgttctgcagccggtcgcggaggctatggatgcgatcgctgcggccgatcttagccagacgagcgggttcggcccattcggaccgcaaggaatcggtcaatacactacatggcgtgatttcatatgcgcgattgctgatccccatgtgtatcactggcaaactgtgatggacgacaccgtcagtgcgtccgtcgcgcaggctctcgatgagctgatgctttgggccgaggactgccccgaagtccggcacctcgtgcacgcggatttcggctccaacaatgtcctgacggacaatggccgcataacagcggtcattgactggagcgaggcgatgttcggggattcccaatacgaggtcgccaacatcttcttctggaggccgtggttggcttgtatggagcagcagacgcgctacttcgagcggaggcatccggagcttgcaggatcgccgcggctccgggcgtatatgctccgcattggtcttgaccaactctatcagagcttggttgacggcaatttcgatgatgcagcttgggcgcagggtcgatgcgacgcaatcgtccgatccggagccgggactgtcgggcgtacacaaatcgcccgcagaagcgcggccgtctggaccgatggctgtgtagaagtactcgccgatagtggaaaccgacgccccagcactcgtccgagggcaaaggaatagtgaggtacagcttggatcgatccggctgctaacaaagcccgaaaggaagctgagttggctgctgccaccgctgagcaataactagcataaccccttggggcctctaaacgggtcttgaggggttttttgctgaaaggaggaactatatccggatgatcgtcgaggcctcacgtgttaacaagcttgcatgccggtttaaacagtcgaggtcgacggtatcgataagcttgttaacagaagttcctattccgaagttcctattctctagaaagtataggaacttccaccacacaacacaatggcggccaccgcttccagaaccacccgattctcttcttcctcttcacaccccaccttccccaaacgcattactagatccaccctccctctctctcatcaaaccctcaccaaacccaaccacgctctcaaaatcaaatgttccatctccaaaccccccacggcggcgcccttcaccaaggaagcgccgaccacggagcccttcgtgtcacggttcgcctccggcgaacctcgcaagggcgcggacatccttgtggaggcgctggagaggcagggcgtgacgacggtgttcgcgtaccccggcggtgcgtcgatggagatccaccaggcgctcacgcgctccgccgccatccgcaacgtgctcccgcgccacgagcagggcggcgtcttcgccgccgaaggctacgcgcgttcctccggcctccccggcgtctgcattgccacctccggccccggcgccaccaacctcgtgagcggcctcgccgacgctttaatggacagcgtcccagtcgtcgccatcaccggccaggtcgcccgccggatgatcggcaccgacgccttccaagaaaccccgatcgtggaggtgagcagatccatcacgaagcacaactacctcatcctcgacgtcgacgacatcccccgcgtcgtcgccgaggctttcttcgtcgccacctccggccgccccggtccggtcctcatcgacattcccaaagacgttcagcagcaactcgccgtgcctaattgggacgagcccgttaacctccccggttacctcgccaggctgcccaggccccccgccgaggcccaattggaacacattgtcagactcatcatggaggcccaaaagcccgttctctacgtcggcggtggcagtttgaattccagtgctgaattgaggcgctttgttgaactcactggtattcccgttgctagcactttaatgggtcttggaacttttcctattggtgatgaatattcccttcagatgctgggtatgcatggtactgtttatgctaactatgctgttgacaatagtgatttgttgcttgcctttggggtaaggtttgatgaccgtgttactgggaagcttgaggcttttgctagtagggctaagattgttcacattgatattgattctgccgagattgggaagaacaagcaggcgcacgtgtcggtttgcgcggatttgaagttggccttgaagggaattaatatgattttggaggagaaaggagtggagggtaagtttgatcttggaggttggagagaagagattaatgtgcagaaacacaagtttccattgggttacaagacattccaggacgcgatttctccgcagcatgctatcgaggttcttgatgagttgactaatggagatgctattgttagtactggggttgggcagcatcaaatgtgggctgcgcagttttacaagtacaagagaccgaggcagtggttgacctcagggggtcttggagccatgggttttggattgcctgcggctattggtgctgctgttgctaaccctggggctgttgtggttgacattgatggggatggtagtttcatcatgaatgttcaggagttggccactataagagtggagaatctcccagttaagatattgttgttgaacaatcagcatttgggtatggtggttcagtgggaggataggttctacaagtccaatagagctcacacctatcttggagatccgtctagcgagagcgagatattcccaaacatgctcaagtttgctgatgcttgtgggataccggcagcgcgagtgacgaagaaggaagagcttagagcggcaattcagagaatgttggacacccctggcccctaccttcttgatgtcattgtgccccatcaggagcatgtgttgccgatgattcccagtaatggatccttcaaggatgtgataactgagggtgatggtagaacgaggtactgactagctagtcagttaacctagacttgtccatcttctggattggccaacttaattaatgtatgaaataaaaggatgcacacatagtgacatgctaatcactataatgtgggcatcaaagttgtgtgttatgtgtaattactagttatctgaataaaagagaaagagatcatccatatttcttatcctaaatgaatgtcacgtgtctttataattctttgatgaaccagatgcatttcattaaccaaatccatatacatataaatattaatcatatataattaatatcaattgggttagcaaaacaaatctagtctaggtgtgttttgcccccaagcttatcgataccgtcggcgcggggtacgttagctgattaagtcagcatgcgcggccggcgtatgaactaaaatgcatgtaggtgtaagagctcatggagagcatggaatattgtatccgaccatgtaacagtataataactgagctccatctcacttcttctatgaataaacaaaggatgttatgatatattaacactctatctatgcaccttattgttctatgataaatttcctcttattattataaatcatctgaatcgtgacggcttatggaatgcttcaaatagtacaaaaacaaatgtgtactataagactttctaaacaattctaaccttagcattgtgaacgagacataagtgttaagaagacataacaattataatggaagaagtttgtctccatttatatattatatattacccacttatgtattatattaggatgttaaggagacataacaattataaagagagaagtttgtatccatttatatattatatactacccatttatatattatacttatccacttatttaatgtctttataaggtttgatccatgatatttctaatattttagttgatatgtatatgaaaaggtactatttgaactctcttactctgtataaaggttggatcatccttaaagtgggtctatttaattttattgcttcttacagataaaaaaaaaattatgagttggtttgataaaatattgaaggatttaaaataataataaataacatataatatatgtatataaatttattataatataacatttatctataaaaaagtaaatattgtcataaatctatacaatcgtttagccttgctggaacgaatctcaattatttaaacgagagtaaacatatttgactttttggttatttaacaaattattatttaacactatatgaaatttttttttttatcagcaaagaataaaattaaattaagaaggacaatggtgtcccaatccttatacaaccaacttccacaagaaagtcaagtcagagacaacaaaaaaacaagcaaaggaaattttttaatttgagttgtcttgtttgctgcataatttatgcagtaaaacactacacataacccttttagcagtagagcaatggttgaccgtgtgcttagcttcttttattttatttttttatcagcaaagaataaataaaataaaatgagacacttcagggatgtttcaacaggtacccatcacttaagtggcgcgccgtcgacggatccgtacgatccatgcccttcatttgccgcttattaattaatttggtaacagtccgtactaatcagttacttatccttcccccatcataattaatcttggtagtctcgaatgccacaacactgactagtctcttggatcataagaaaaagccaaggaacaaaagaagacaaaacacaatgagagtatcctttgcatagcaatgtctaagttcataaaattcaaacaaaaacgcaatcacacacagtggacatcacttatccactagctgatcaggatcgccgcgtcaagaaaaaaaaactggaccccaaaagccatgcacaacaacacgtactcacaaaggtgtcaatcgagcagcccaaaacattcaccaactcaacccatcatgagccctcacatttgttgtttctaacccaacctcaaactcgtattctcttccgccacctcatttttgtttatttcaacacccgtcaaactgcatgccaccccgtggccaaatgtccatgcatgttaacaagacctatgactataaatagctgcaatctcggcccaggttttcatcatcaagaaccagttcaatatcctagtacaccgtattaaagaatttaagatatactgcggccgcatgactatcgactcacaatactacaagtcgcgagacaaaaacgacacggcacccaaaatcgcgggaatccgatatgccccgctatcgacaccattactcaaccgatgtgagaccttctctctggtctggcacattttcagcattcccactttcctcacaattttcatgctatgctgcgcaattccactgctctggccatttgtgattgcgtatgtagtgtacgctgttaaagacgactccccgtccaacggaggagtggtcaagcgatactcgcctatttcaagaaacttcttcatctggaagctctttggccgctacttccccataactctgcacaagacggtggatctggagcccacgcacacatactaccctctggacgtccaggagtatcacctgattgctgagagatactggccgcagaacaagtacctccgagcaatcatcaccaccatcgagtactttctgcccgccttcatgaaacggtctctttctatcaacgagcaggagcagcctgccgagcgagatcctctcctgtctcccgtttctcccagctctccgggttctcaacctgacaagtggattaaccacgacagcagatatagccgtggagaatcatctggctccaacggccacgcctcgggctccgaacttaacggcaacggcaacaacggcaccactaaccgacgacctttgtcgtccgcctctgctggctccactgcatctgattccacgcttcttaacgggtccctcaactcctacgccaaccagatcattggcgaaaacgacccacagctgtcgcccacaaaactcaagcccactggcagaaaatacatcttcggctaccacccccacggcattatcggcatgggagcctttggtggaattgccaccgagggagctggatggtccaagctctttccgggcatccctgtttctcttatgactctcaccaacaacttccgagtgcctctctacagagagtacctcatgagtctgggagtcgcttctgtctccaagaagtcctgcaaggccctcctcaagcgaaaccagtctatctgcattgtcgttggtggagcacaggaaagtcttctggccagacccggtgtcatggacctggtgctactcaagcgaaagggttttgttcgacttggtatggaggtcggaaatgtcgcccttgttcccatcatggcctttggtgagaacgacctctatgaccaggttagcaacgacaagtcgtccaagctgtaccgattccagcagtttgtcaagaacttccttggattcacccttcctttgatgcatgcccgaggcgtcttcaactacgatgtcggtcttgtcccctacaggcgacccgtcaacattgtggttggttcccccattgacttgccttatctcccacaccccaccgacgaagaagtgtccgaataccacgaccgatacatcgccgagctgcagcgaatctacaacgagcacaaggatgaatatttcatcgattggaccgaggagggcaaaggagccccagagttccgaatgattgagtaagcggccgcaagtatgaactaaaatgcatgtaggtgtaagagctcatggagagcatggaatattgtatccgaccatgtaacagtataataactgagctccatctcacttcttctatgaataaacaaaggatgttatgatatattaacactctatctatgcaccttattgttctatgataaatttcctcttattattataaatcatctgaatcgtgacggcttatggaatgcttcaaatagtacaaaaacaaatgtgtactataagactttctaaacaattctaaccttagcattgtgaacgagacataagtgttaagaagacataacaattataatggaagaagtttgtctccatttatatattatatattacccacttatgtattatattaggatgttaaggagacataacaattataaagagagaagtttgtatccatttatatattatatactacccatttatatattatacttatccacttatttaatgtctttataaggtttgatccatgatatttctaatattttagttgatatgtatatgaaaaggtactatttgaactctcttactctgtataaaggttggatcatccttaaagtgggtctatttaattttattgcttcttacagataaaaaaaaaattatgagttggtttgataaaatattgaaggatttaaaataataataaataacatataatatatgtatataaatttattataatataacatttatctataaaaaagtaaatattgtcataaatctatacaatcgtttagccttgctggaacgaatctcaattatttaaacgagagtaaacatatttgactttttggttatttaacaaattattatttaacactatatgaaatttttttttttatcagcaaagaataaaattaaattaagaaggacaatggtgtcccaatccttatacaaccaacttccacaagaaagtcaagtcagagacaacaaaaaaacaagcaaaggaaattttttaatttgagttgtcttgtttgctgcataatttatgcagtaaaacactacacataacccttttagcagtagagcaatggttgaccgtgtgcttagcttcttttattttatttttttatcagcaaagaataaataaaataaaatgagacacttcagggatgtttcaacgtacgtctttccacaatacataactattaattaatcttaaataaataaaggataaaatatttttttttcttcataaagttaaaatatgttattttttgtttagatgtatattcgaataaatctaaatatatgataatgattttttatattgattaaacatataatcaatattaaatatgatatttttttatataggttgtacacataattttataaggataaaaaatatgataaaaataaattttaaatatttttatatttacgagaaaaaaaaatattttagccataaataaatgaccagcatattttacaaccttagtaattcataaattcctatatgtatatttgaaattaaaaacagataatcgttaagggaaggaatcctacgtcatctcttgccatttgtttttcatgcaaacagaaagggacgaaaaaccacctcaccatgaatcactcttcacaccatttttactagcaaacaagtctcaacaactgaagccagctctctttccgtttctttttacaacactttctttgaaatagtagtattttttttcacatgatttattaacgtgccaaaagatgcttattgaatagagtgcacatttgtaatgtactactaattagaacatgaaaaagcattgttctaacacgataatcctgtgaaggcgttaactccaaagatccaatttcactatataaattgtgacgaaagcaaaatgaattcacatagctgagagagaaaggaaaggttaactaagaagcaatacttcagcggccgcttctagctagctagggtttgggtagtgagtgtaataaagttgcaaagtttttggttaggttacgttttgaccttattattatagttcaaagggaaacattaattaaaggggattatgaagtgggctctcttgattcttggatgaggatcttactgggtgaattgagctgcttagctatggatcccacagttctacccatcaataagtgcttttgtggtagtcttgtggcttccatatctggggagcttcatttgcctttatagtattaaccttctccaagaacaaagagagcccacacccttctcttcttttctctcataataatttaaatttgttatagactctaaactttaaatgttttttttgaagtttttccgtttttctcttttgccatgatcccgttcttgctgtggagtaaccttgtccgaggtatgtgcatgattagatccatacttaatttgtgtgcatcacgaaggtgaggttgaaatgaactttgcttttttgaccttttaggaaagttcttttgttgcagtaatcaattttaattagttttaattgacactattacttttattgtcatctttgttagttttattgttgaattgagtgcatatttcctaggaaattctcttacctaacattttttatacagatctatgctcttggctcttgcccttactcttggccttgtgttggttatttgtctacatatttattgactggtcgatgagacatgtcacaattcttgggcttatttgttggtctaataaaaggagtgcttattgaaagatcaagacggagattcggttttatataaataaactaaagatgacatattagtgtgttgatgtctcttcaggataatttttgtttgaaataatatggtaatgtcttgtctaaatttgtgtacataattcttactgattttttggattgttggatttttataaacaaatctgcggccgcatgagccgtaaaggttcaatacaacgagtgcttgttttcttagggacaagcattgtacttatgtatgattctgtgtaaccatgagtcttccacgttgtactaatgtgaagggcaaaaataaaacacagaacaagttcgtttttctcaaataatgtgaaggtagaaaatggaaccatgcctcctctcttgcatgtgatttaaaatattagcagatggtacgtcgagtcgacctgcaggagatccaagcttgg

SEQ ID NO: 16 - DNA, 3398 bp, artificial sequence
  Not1 fragment containing GAS123hp
ggccgctagtcgactaagtcatcaactattccaagctacgtatttgggagtttgtggagtacagcaagatgatatacctagacggtgatatccaagtttttgacaacattgaccacttgtttgacttgcctgataactacttctatgcggtgatggactgtttctgtgagccaacttggggccacactaaacaatatcagatcggttactgccagcagtgcccccataaggttcagtggcccactcactttgggcccaaacctcctctctatttcaatgctggcatgtttgtgtatgagcccaatttggctacttaccgtgacctccttcaaacagtccaagtcacccagcccacttcctttgctgaacaggattttttgaacatgtacttcaaggacaaatataggccaattcctaatgtctacaatcttgtgctggccatgctgtggcgtcaccctgagaacgttgagcttgacaaagttaaagtggttcactactgtgctgctgggtctaagccttggaggtacactgggaagtgactcgaggtcatcaattactccaagctacgtatttgggagttcgtggagtacaagaagacgatatacctagacggtgacatccaagtatttggaaacatagaccacttgtttgatctgcctgataattatttctatgcggtgatggattgtttctgcgagaagacttggagccacacccctcagttccagattgggtactgccaacagtgccctgataaggttcaatggccctctcactttggttccaaacctcctctatatttcaatgctggcatgtttgtttatgagcctaatctcgacacctaccgtgatcttctccaaactgtccaactcaccaagcccacttcttttgctgagcaggactttctcaacatgtacttcaaggacaagtacaagccaataccgaacatgtacaaccttgtgctggccatgttgtggcgtcaccctgaaaatgttgaacttgataaagttcaagtggttcattactgtgctgctgggtctaagccttggaggttcactgggaagtaactgcaggtcatcaactactccaagctccgtatatgggagtttgtggagtacagcaagatgatatacttggacggagacattgaggtatatgagaacatagaccacctatttgacctacctgatggtaacttttacgctgtgatggattgtttctgcgagaagacatggagtcacacccctcagtacaaggtgggttactgccagcaatgcccggagaaggtgcggtggcccaccgaattgggtcagcccccttctctttacttcaacgctggcatgttcgtgttcgaacccaacatcgccacctatcatgacctattgaaaacggtgcaagtcaccactcccacctcgttcgctgaacaagatttcttgaacatgtacttcaaggacatttacaagccaatccctttaaattacaatcttgtcctcgccatgctgtggcgccacccggaaaacgttaaattagaccaagtcaaggttgttcactattgcgcagcggggtccaagccatggagatatacggggaagtagcctaggcgtacgcaggtaagtttctgcttctacctttgatatatatataataattatcattaattagtagtaatataatatttcaaatatttttttcaaaataaaagaatgtagtatatagcaattgcttttctgtagtttataagtgtgtatattttaatttataacttttctaatatatgaccaaaacatggtgatgtgcaggtcctaggctacttccccgtatatctccatggcttggaccccgctgcgcaatagtgaacaaccttgacttggtctaatttaacgttttccgggtggcgccacagcatggcgaggacaagattgtaatttaaagggattggcttgtaaatgtccttgaagtacatgttcaagaaatcttgttcagcgaacgaggtgggagtggtgacttgcaccgttttcaataggtcatgataggtggcgatgttgggttcgaacacgaacatgccagcgttgaagtaaagagaagggggctgacccaattcggtgggccaccgcaccttctccgggcattgctggcagtaacccaccttgtactgaggggtgtgactccatgtcttctcgcagaaacaatccatcacagcgtaaaagttaccatcaggtaggtcaaataggtggtctatgttctcatatacctcaatgtctccgtccaagtatatcatcttgctgtactccacaaactcccatatacggagcttggagtagttgatgacctgcagttacttcccagtgaacctccaaggcttagacccagcagcacagtaatgaaccacttgaactttatcaagttcaacattttcagggtgacgccacaacatggccagcacaaggttgtacatgttcggtattggcttgtacttgtccttgaagtacatgttgagaaagtcctgctcagcaaaagaagtgggcttggtgagttggacagtttggagaagatcacggtaggtgtcgagattaggctcataaacaaacatgccagcattgaaatatagaggaggtttggaaccaaagtgagagggccattgaaccttatcagggcactgttggcagtacccaatctggaactgaggggtgtggctccaagtcttctcgcagaaacaatccatcaccgcatagaaataattatcaggcagatcaaacaagtggtctatgtttccaaatacttggatgtcaccgtctaggtatatcgtcttcttgtactccacgaactcccaaatacgtagcttggagtaattgatgacctcgagtcacttcccagtgtacctccaaggcttagacccagcagcacagtagtgaaccactttaactttgtcaagctcaacgttctcagggtgacgccacagcatggccagcacaagattgtagacattaggaattggcctatatttgtccttgaagtacatgttcaaaaaatcctgttcagcaaaggaagtgggctgggtgacttggactgtttgaaggaggtcacggtaagtagccaaattgggctcatacacaaacatgccagcattgaaatagagaggaggtttgggcccaaagtgagtgggccactgaaccttatgggggcactgctggcagtaaccgatctgatattgtttagtgtggccccaagttggctcacagaaacagtccatcaccgcatagaagtagttatcaggcaagtcaaacaagtggtcaatgttgtcaaaaacttggatatcaccgtctaggtatatcatcttgctgtactccacaaactcccaaatacgtagcttggaatagttgatgacttagtcgactagc

SEQ ID NO: 17 - DNA, 5249 bp, artificial sequence
  plasmid pKR1273
  misc_feature (3843)..(3843): n is a, c, g, or t
aattcactggccgtcgttttacaacgtcgtgactgggaaaaccctggcgttacccaacttaatcgccttgcagcacatccccctttcgccagctggcgtaatagcgaagaggcccgcaccgatcgcccttcccaacagttgcgcagcctgaatggcgaatggcgcctgatgcggtattttctccttacgcatctgtgcggtatttcacaccgcatatggtgcactctcagtacaatctgctctgatgccgcatagttaagccagccccgacacccgccaacacccgctgacgcgccctgacgggcttgtctgctcccggcatccgcttacagacaagctgtgaccgtctccgggagctgcatgtgtcagaggttttcaccgtcatcaccgaaacgcgcgagacgaaagggcctcgtgatacgcctatttttataggttaatgtcatgataataatggtttcttagacgtcaggtggcacttttcggggaaatgtgcgcggaacccctatttgtttatttttctaaatacattcaaatatgtatccgctcatgagacaataaccctgataaatgcttcaataatattgaaaaaggaagagtatgagtattcaacatttccgtgtcgcccttattcccttttttgcggcattttgccttcctgtttttgctcacccagaaacgctggtgaaagtaaaagatgctgaagatcagttgggtgcacgagtgggttacatcgaactggatctcaacagcggtaagatccttgagagttttcgccccgaagaacgttttccaatgatgagcacttttaaagttctgctatgtggcgcggtattatcccgtattgacgccgggcaagagcaactcggtcgccgcatacactattctcagaatgacttggttgagtactcaccagtcacagaaaagcatcttacggatggcatgacagtaagagaattatgcagtgctgccataaccatgagtgataacactgcggccaacttacttctgacaacgatcggaggaccgaaggagctaaccgcttttttgcacaacatgggggatcatgtaactcgccttgatcgttgggaaccggagctgaatgaagccataccaaacgacgagcgtgacaccacgatgcctgtagcaatggcaacaacgttgcgcaaactattaactggcgaactacttactctagcttcccggcaacaattaatagactggatggaggcggataaagttgcaggaccacttctgcgctcggcccttccggctggctggtttattgctgataaatctggagccggtgagcgtgggtctcgcggtatcattgcagcactggggccagatggtaagccctcccgtatcgtagttatctacacgacggggagtcaggcaactatggatgaacgaaatagacagatcgctgagataggtgcctcactgattaagcattggtaactgtcagaccaagtttactcatatatactttagattgatttaaaacttcatttttaatttaaaaggatctaggtgaagatcctttttgataatctcatgaccaaaatcccttaacgtgagttttcgttccactgagcgtcagaccccgtagaaaagatcaaaggatcttcttgagatcctttttttctgcgcgtaatctgctgcttgcaaacaaaaaaaccaccgctaccagcggtggtttgtttgccggatcaagagctaccaactctttttccgaaggtaactggcttcagcagagcgcagataccaaatactgtccttctagtgtagccgtagttaggccaccacttcaagaactctgtagcaccgcctacatacctcgctctgctaatcctgttaccagtggctgctgccagtggcgataagtcgtgtcttaccgggttggactcaagacgatagttaccggataaggcgcagcggtcgggctgaacggggggttcgtgcacacagcccagcttggagcgaacgacctacaccgaactgagatacctacagcgtgagctatgagaaagcgccacgcttcccgaagggagaaaggcggacaggtatccggtaagcggcagggtcggaacaggagagcgcacgagggagcttccagggggaaacgcctggtatctttatagtcctgtcgggtttcgccacctctgacttgagcgtcgatttttgtgatgctcgtcaggggggcggagcctatggaaaaacgccagcaacgcggcctttttacggttcctggccttttgctggccttttgctcacatgttctttcctgcgttatcccctgattctgtggataaccgtattaccgcctttgagtgagctgataccgctcgccgcagccgaacgaccgagcgcagcgagtcagtgagcgaggaagcggaagagcgcccaatacgcaaaccgcctctccccgcgcgttggccgattcattaatgcagctggcacgacaggtttcccgactggaaagcgggcagtgagcgcaacgcaattaatgtgagttagctcactcattaggcaccccaggctttacactttatgcttccggctcgtatgttgtgtggaattgtgagcggataacaatttcacacaggaaacagctatgaccatgattacgccaagcttgcatgcctgcaggtcgactcgacgtacgtcctcgaagagaagggttaataacacattttttaacatttttaacacaaattttagttatttaaaaatttattaaaaaatttaaaataagaagaggaactctttaaataaatctaacttacaaaatttatgatttttaataagttttcaccaataaaaaatgtcataaaaatatgttaaaaagtatattatcaatattctctttatgataaataaaaagaaaaaaaaaataaaagttaagtgaaaatgagattgaagtgactttaggtgtgtataaatatatcaaccccgccaacaatttatttaatccaaatatattgaagtatattattccatagcctttatttatttatatatttattatataaaagctttatttgttctaggttgttcatgaaatatttttttggttttatctccgttgtaagaaaatcatgtgctttgtgtcgccactcactattgcagctttttcatgcattggtcagattgacggttgattgtatttttgttttttatggttttgtgttatgacttaagtcttcatctctttatctcttcatcaggtttgatggttacctaatatggtccatgggtacatgcatggttaaattaggtggccaactttgttgtgaacgatagaattttttttatattaagtaaactatttttatattatgaaataataataaaaaaaatattttatcattattaacaaaatcatattagttaatttgttaactctataataaaagaaatactgtaacattcacattacatggtaacatctttccaccctttcatttgttttttgtttgatgactttttttcttgtttaaatttatttcccttcttttaaatttggaatacattatcatcatatataaactaaaatactaaaaacaggattacacaaatgataaataataacacaaatatttataaatctagctgcaatatatttaaactagctatatcgatattgtaaaataaaactagctgcattgatactgataaaaaaatatcatgtgctttctggactgatgatgcagtatacttttgacattgcctttattttatttttcagaaaagctttcttagttctgggttcttcattatttgtttcccatctccattgtgaattgaatcatttgcttcgtgtcacaaatacaatttagntaggtacatgcattggtcagattcacggtttattatgtcatgacttaagttcatggtagtacattacctgccacgcatgcattatattggttagatttgataggcaaatttggttgtcaacaatataaatataaataatgtttttatattacgaaataacagtgatcaaaacaaacagttttatctttattaacaagattttgtttttgtttgatgacgttttttaatgtttacgctttcccccttcttttgaatttagaacactttatcatcataaaatcaaatactaaaaaaattacatatttcataaataataacacaaatatttttaaaaaatctgaaataataatgaacaatattacatattatcacgaaaattcattaataaaaatattatataaataaaatgtaatagtagttatatgtaggaaaaaagtactgcacgcataatatatacaaaaagattaaaatgaactattataaataataacactaaattaatggtgaatcatatcaaaataatgaaaaagtaaataaaatttgtaattaacttctatatgtattacacacacaaataataaataatagtaaaaaaaattatgataaatatttaccatctcataagatatttaaaataatgataaaaatatagattattttttatgcaactagctagccaaaaagagaacacgggtatatataaaaagagtacctttaaattctactgtacttcctttattcctgacgtttttatatcaagtggacatacgtgaagattttaattatcagtctaaatatttcattagcacttaatacttttctgttttattcctatcctataagtagtcccgattctcccaacattgcttattcacacaactaactaagaaagtcttccatagccccccaagcggccgcgacacaagtgtgagagtactaaataaatgctttggttgtacgaaatcattacactaaataaaataatcaaagcttatatatgccttccgctaaggccgaatgcaaagaaattggttctttctcgttatcttttgccacttttactagtacgtattaattactacttaatcatctttgtttacggctcattatatccggtctaggccaaggccgcgaagttaaaagcaatgttgtcacttgtacgtactaacacatgatgtgatagtttatgctagctagctataacataagctgtctctgagtgtgttgtatattaataaagatcatcactggtgaatggtgatcgtgtacgtaccctacttagtaggcaatggaagcacttagagtgtgctttgtgcatggccttgcctctgttttgagacttttgtaatgttttcgagtttaaatctttgcctttgcgtacgtgggcggatcccctgcaggacctg

SEQ ID NO: 18 - DNA, 8647 bp, artificial sequence
  pKR1292
  misc_feature (4337)..(4337): n is a, c, g, or t
ggccgcgacacaagtgtgagagtactaaataaatgctttggttgtacgaaatcattacactaaataaaataatcaaagcttatatatgccttccgctaaggccgaatgcaaagaaattggttctttctcgttatcttttgccacttttactagtacgtattaattactacttaatcatctttgtttacggctcattatatccggtctaggccaaggccgcgaagttaaaagcaatgttgtcacttgtacgtactaacacatgatgtgatagtttatgctagctagctataacataagctgtctctgagtgtgttgtatattaataaagatcatcactggtgaatggtgatcgtgtacgtaccctacttagtaggcaatggaagcacttagagtgtgctttgtgcatggccttgcctctgttttgagacttttgtaatgttttcgagtttaaatctttgcctttgcgtacgtgggcggatcccctgcaggacctgaattcactggccgtcgttttacaacgtcgtgactgggaaaaccctggcgttacccaacttaatcgccttgcagcacatccccctttcgccagctggcgtaatagcgaagaggcccgcaccgatcgcccttcccaacagttgcgcagcctgaatggcgaatggcgcctgatgcggtattttctccttacgcatctgtgcggtatttcacaccgcatatggtgcactctcagtacaatctgctctgatgccgcatagttaagccagccccgacacccgccaacacccgctgacgcgccctgacgggcttgtctgctcccggcatccgcttacagacaagctgtgaccgtctccgggagctgcatgtgtcagaggttttcaccgtcatcaccgaaacgcgcgagacgaaagggcctcgtgatacgcctatttttataggttaatgtcatgataataatggtttcttagacgtcaggtggcacttttcggggaaatgtgcgcggaacccctatttgtttatttttctaaatacattcaaatatgtatccgctcatgagacaataaccctgataaatgcttcaataatattgaaaaaggaagagtatgagtattcaacatttccgtgtcgcccttattcccttttttgcggcattttgccttcctgtttttgctcacccagaaacgctggtgaaagtaaaagatgctgaagatcagttgggtgcacgagtgggttacatcgaactggatctcaacagcggtaagatccttgagagttttcgccccgaagaacgttttccaatgatgagcacttttaaagttctgctatgtggcgcggtattatcccgtattgacgccgggcaagagcaactcggtcgccgcatacactattctcagaatgacttggttgagtactcaccagtcacagaaaagcatcttacggatggcatgacagtaagagaattatgcagtgctgccataaccatgagtgataacactgcggccaacttacttctgacaacgatcggaggaccgaaggagctaaccgcttttttgcacaacatgggggatcatgtaactcgccttgatcgttgggaaccggagctgaatgaagccataccaaacgacgagcgtgacaccacgatgcctgtagcaatggcaacaacgttgcgcaaactattaactggcgaactacttactctagcttcccggcaacaattaatagactggatggaggcggataaagttgcaggaccacttctgcgctcggcccttccggctggctggtttattgctgataaatctggagccggtgagcgtgggtctcgcggtatcattgcagcactggggccagatggtaagccctcccgtatcgtagttatctacacgacggggagtcaggcaactatggatgaacgaaatagacagatcgctgagataggtgcctcactgattaagcattggtaactgtcagaccaagtttactcatatatactttagattgatttaaaacttcatttttaatttaaaaggatctaggtgaagatcctttttgataatctcatgaccaaaatcccttaacgtgagttttcgttccactgagcgtcagaccccgtagaaaagatcaaaggatcttcttgagatcctttttttctgcgcgtaatctgctgcttgcaaacaaaaaaaccaccgctaccagcggtggtttgtttgccggatcaagagctaccaactctttttccgaaggtaactggcttcagcagagcgcagataccaaatactgtccttctagtgtagccgtagttaggccaccacttcaagaactctgtagcaccgcctacatacctcgctctgctaatcctgttaccagtggctgctgccagtggcgataagtcgtgtcttaccgggttggactcaagacgatagttaccggataaggcgcagcggtcgggctgaacggggggttcgtgcacacagcccagcttggagcgaacgacctacaccgaactgagatacctacagcgtgagctatgagaaagcgccacgcttcccgaagggagaaaggcggacaggtatccggtaagcggcagggtcggaacaggagagcgcacgagggagcttccagggggaaacgcctggtatctttatagtcctgtcgggtttcgccacctctgacttgagcgtcgatttttgtgatgctcgtcaggggggcggagcctatggaaaaacgccagcaacgcggcctttttacggttcctggccttttgctggccttttgctcacatgttctttcctgcgttatcccctgattctgtggataaccgtattaccgcctttgagtgagctgataccgctcgccgcagccgaacgaccgagcgcagcgagtcagtgagcgaggaagcggaagagcgcccaatacgcaaaccgcctctccccgcgcgttggccgattcattaatgcagctggcacgacaggtttcccgactggaaagcgggcagtgagcgcaacgcaattaatgtgagttagctcactcattaggcaccccaggctttacactttatgcttccggctcgtatgttgtgtggaattgtgagcggataacaatttcacacaggaaacagctatgaccatgattacgccaagcttgcatgcctgcaggtcgactcgacgtacgtcctcgaagagaagggttaataacacattttttaacatttttaacacaaattttagttatttaaaaatttattaaaaaatttaaaataagaagaggaactctttaaataaatctaacttacaaaatttatgatttttaataagttttcaccaataaaaaatgtcataaaaatatgttaaaaagtatattatcaatattctctttatgataaataaaaagaaaaaaaaaataaaagttaagtgaaaatgagattgaagtgactttaggtgtgtataaatatatcaaccccgccaacaatttatttaatccaaatatattgaagtatattattccatagcctttatttatttatatatttattatataaaagctttatttgttctaggttgttcatgaaatatttttttggttttatctccgttgtaagaaaatcatgtgctttgtgtcgccactcactattgcagctttttcatgcattggtcagattgacggttgattgtatttttgttttttatggttttgtgttatgacttaagtcttcatctctttatctcttcatcaggtttgatggttacctaatatggtccatgggtacatgcatggttaaattaggtggccaactttgttgtgaacgatagaattttttttatattaagtaaactatttttatattatgaaataataataaaaaaaatattttatcattattaacaaaatcatattagttaatttgttaactctataataaaagaaatactgtaacattcacattacatggtaacatctttccaccctttcatttgttttttgtttgatgactttttttcttgtttaaatttatttcccttcttttaaatttggaatacattatcatcatatataaactaaaatactaaaaacaggattacacaaatgataaataataacacaaatatttataaatctagctgcaatatatttaaactagctatatcgatattgtaaaataaaactagctgcattgatactgataaaaaaatatcatgtgctttctggactgatgatgcagtatacttttgacattgcctttattttatttttcagaaaagctttcttagttctgggttcttcattatttgtttcccatctccattgtgaattgaatcatttgcttcgtgtcacaaatacaatttagntaggtacatgcattggtcagattcacggtttattatgtcatgacttaagttcatggtagtacattacctgccacgcatgcattatattggttagatttgataggcaaatttggttgtcaacaatataaatataaataatgtttttatattacgaaataacagtgatcaaaacaaacagttttatctttattaacaagattttgtttttgtttgatgacgttttttaatgtttacgctttcccccttcttttgaatttagaacactttatcatcataaaatcaaatactaaaaaaattacatatttcataaataataacacaaatatttttaaaaaatctgaaataataatgaacaatattacatattatcacgaaaattcattaataaaaatattatataaataaaatgtaatagtagttatatgtaggaaaaaagtactgcacgcataatatatacaaaaagattaaaatgaactattataaataataacactaaattaatggtgaatcatatcaaaataatgaaaaagtaaataaaatttgtaattaacttctatatgtattacacacacaaataataaataatagtaaaaaaaattatgataaatatttaccatctcataagatatttaaaataatgataaaaatatagattattttttatgcaactagctagccaaaaagagaacacgggtatatataaaaagagtacctttaaattctactgtacttcctttattcctgacgtttttatatcaagtggacatacgtgaagattttaattatcagtctaaatatttcattagcacttaatacttttctgttttattcctatcctataagtagtcccgattctcccaacattgcttattcacacaactaactaagaaagtcttccatagccccccaagcggccgctagtcgactaagtcatcaactattccaagctacgtatttgggagtttgtggagtacagcaagatgatatacctagacggtgatatccaagtttttgacaacattgaccacttgtttgacttgcctgataactacttctatgcggtgatggactgtttctgtgagccaacttggggccacactaaacaatatcagatcggttactgccagcagtgcccccataaggttcagtggcccactcactttgggcccaaacctcctctctatttcaatgctggcatgtttgtgtatgagcccaatttggctacttaccgtgacctccttcaaacagtccaagtcacccagcccacttcctttgctgaacaggattttttgaacatgtacttcaaggacaaatataggccaattcctaatgtctacaatcttgtgctggccatgctgtggcgtcaccctgagaacgttgagcttgacaaagttaaagtggttcactactgtgctgctgggtctaagccttggaggtacactgggaagtgactcgaggtcatcaattactccaagctacgtatttgggagttcgtggagtacaagaagacgatatacctagacggtgacatccaagtatttggaaacatagaccacttgtttgatctgcctgataattatttctatgcggtgatggattgtttctgcgagaagacttggagccacacccctcagttccagattgggtactgccaacagtgccctgataaggttcaatggccctctcactttggttccaaacctcctctatatttcaatgctggcatgtttgtttatgagcctaatctcgacacctaccgtgatcttctccaaactgtccaactcaccaagcccacttcttttgctgagcaggactttctcaacatgtacttcaaggacaagtacaagccaataccgaacatgtacaaccttgtgctggccatgttgtggcgtcaccctgaaaatgttgaacttgataaagttcaagtggttcattactgtgctgctgggtctaagccttggaggttcactgggaagtaactgcaggtcatcaactactccaagctccgtatatgggagtttgtggagtacagcaagatgatatacttggacggagacattgaggtatatgagaacatagaccacctatttgacctacctgatggtaacttttacgctgtgatggattgtttctgcgagaagacatggagtcacacccctcagtacaaggtgggttactgccagcaatgcccggagaaggtgcggtggcccaccgaattgggtcagcccccttctctttacttcaacgctggcatgttcgtgttcgaacccaacatcgccacctatcatgacctattgaaaacggtgcaagtcaccactcccacctcgttcgctgaacaagatttcttgaacatgtacttcaaggacatttacaagccaatccctttaaattacaatcttgtcctcgccatgctgtggcgccacccggaaaacgttaaattagaccaagtcaaggttgttcactattgcgcagcggggtccaagccatggagatatacggggaagtagcctaggcgtacgcaggtaagtttctgcttctacctttgatatatatataataattatcattaattagtagtaatataatatttcaaatatttttttcaaaataaaagaatgtagtatatagcaattgcttttctgtagtttataagtgtgtatattttaatttataacttttctaatatatgaccaaaacatggtgatgtgcaggtcctaggctacttccccgtatatctccatggcttggaccccgctgcgcaatagtgaacaaccttgacttggtctaatttaacgttttccgggtggcgccacagcatggcgaggacaagattgtaatttaaagggattggcttgtaaatgtccttgaagtacatgttcaagaaatcttgttcagcgaacgaggtgggagtggtgacttgcaccgttttcaataggtcatgataggtggcgatgttgggttcgaacacgaacatgccagcgttgaagtaaagagaagggggctgacccaattcggtgggccaccgcaccttctccgggcattgctggcagtaacccaccttgtactgaggggtgtgactccatgtcttctcgcagaaacaatccatcacagcgtaaaagttaccatcaggtaggtcaaataggtggtctatgttctcatatacctcaatgtctccgtccaagtatatcatcttgctgtactccacaaactcccatatacggagcttggagtagttgatgacctgcagttacttcccagtgaacctccaaggcttagacccagcagcacagtaatgaaccacttgaactttatcaagttcaacattttcagggtgacgccacaacatggccagcacaaggttgtacatgttcggtattggcttgtacttgtccttgaagtacatgttgagaaagtcctgctcagcaaaagaagtgggcttggtgagttggacagtttggagaagatcacggtaggtgtcgagattaggctcataaacaaacatgccagcattgaaatatagaggaggtttggaaccaaagtgagagggccattgaaccttatcagggcactgttggcagtacccaatctggaactgaggggtgtggctccaagtcttctcgcagaaacaatccatcaccgcatagaaataattatcaggcagatcaaacaagtggtctatgtttccaaatacttggatgtcaccgtctaggtatatcgtcttcttgtactccacgaactcccaaatacgtagcttggagtaattgatgacctcgagtcacttcccagtgtacctccaaggcttagacccagcagcacagtagtgaaccactttaactttgtcaagctcaacgttctcagggtgacgccacagcatggccagcacaagattgtagacattaggaattggcctatatttgtccttgaagtacatgttcaaaaaatcctgttcagcaaaggaagtgggctgggtgacttggactgtttgaaggaggtcacggtaagtagccaaattgggctcatacacaaacatgccagcattgaaatagagaggaggtttgggcccaaagtgagtgggccactgaaccttatgggggcactgctggcagtaaccgatctgatattgtttagtgtggccccaagttggctcacagaaacagtccatcaccgcatagaagtagttatcaggcaagtcaaacaagtggtcaatgttgtcaaaaacttggatatcaccgtctaggtatatcatcttgctgtactccacaaactcccaaatacgtagcttggaatagttgatgacttagtcgactagc

SEQ ID NO: 19 - DNA, 17679 bp, artificial sequence
  plasmid pKR1986 (PHP50573)
  misc_feature (12882)..(12882): n is a, c, g, or t
ggagatccaagcttggcgcgccggaattaattaggtaatttcacgcgccggatccttaattaagtctagagtcgactgtttaattctagtggccggcccagctgatgatcccggtgaagttcctattccgaagttcctattctccagaaagtataggaacttcactagagcttgcggccgctcgagttctatagtgtcacctaaatcgtatgtgtatgatacataaggttatgtattaattgtagccgcgttctaacgacaatatgtccatatggtgcactctcagtacaatctgctctgatgccgcatagttaagccagccccgacacccgccaacacccgctgacgcgccctgacgggcttgtctgctcccggcatccgcttacagacaagctgtgaccgtctccgggagctgcatgtgtcagaggttttcaccgtcatcaccgaaacgcgcgagacgaaagggcctcgtgatacgcctatttttataggttaatgtcatgaccaaaatcccttaacgtgagttttcgttccactgagcgtcagaccccgtagaaaagatcaaaggatcttcttgagatcctttttttctgcgcgtaatctgctgcttgcaaacaaaaaaaccaccgctaccagcggtggtttgtttgccggatcaagagctaccaactctttttccgaaggtaactggcttcagcagagcgcagataccaaatactgtccttctagtgtagccgtagttaggccaccacttcaagaactctgtagcaccgcctacatacctcgctctgctaatcctgttaccagtggctgctgccagtggcgataagtcgtgtcttaccgggttggactcaagacgatagttaccggataaggcgcagcggtcgggctgaacggggggttcgtgcacacagcccagcttggagcgaacgacctacaccgaactgagatacctacagcgtgagcattgagaaagcgccacgcttcccgaagggagaaaggcggacaggtatccggtaagcggcagggtcggaacaggagagcgcacgagggagcttccagggggaaacgcctggtatctttatagtcctgtcgggtttcgccacctctgacttgagcgtcgatttttgtgatgctcgtcaggggggcggagcctatggaaaaacgccagcaacgcggcctttttacggttcctggccttttgctggccttttgctcacatgttctttcctgcgttatcccctgattctgtggataaccgtattaccgcctttgagtgagctgataccgctcgccgcagccgaacgaccgagcgcagcgagtcagtgagcgaggaagcggaagagcgcccaatacgcaaaccgcctctccccgcgcgttggccgattcattaatgcaggttgatcagatctcgatcccgcgaaattaatacgactcactatagggagaccacaacggtttccctctagaaataattttgtttaactttaagaaggagatatacccatggaaaagcctgaactcaccgcgacgtctgtcgagaagtttctgatcgaaaagttcgacagcgtctccgacctgatgcagctctcggagggcgaagaatctcgtgctttcagcttcgatgtaggagggcgtggatatgtcctgcgggtaaatagctgcgccgatggtttctacaaagatcgttatgtttatcggcactttgcatcggccgcgctcccgattccggaagtgcttgacattggggaattcagcgagagcctgacctattgcatctcccgccgtgcacagggtgtcacgttgcaagacctgcctgaaaccgaactgcccgctgttctgcagccggtcgcggaggctatggatgcgatcgctgcggccgatcttagccagacgagcgggttcggcccattcggaccgcaaggaatcggtcaatacactacatggcgtgatttcatatgcgcgattgctgatccccatgtgtatcactggcaaactgtgatggacgacaccgtcagtgcgtccgtcgcgcaggctctcgatgagctgatgctttgggccgaggactgccccgaagtccggcacctcgtgcacgcggatttcggctccaacaatgtcctgacggacaatggccgcataacagcggtcattgactggagcgaggcgatgttcggggattcccaatacgaggtcgccaacatcttcttctggaggccgtggttggcttgtatggagcagcagacgcgctacttcgagcggaggcatccggagcttgcaggatcgccgcggctccgggcgtatatgctccgcattggtcttgaccaactctatcagagcttggttgacggcaatttcgatgatgcagcttgggcgcagggtcgatgcgacgcaatcgtccgatccggagccgggactgtcgggcgtacacaaatcgcccgcagaagcgcggccgtctggaccgatggctgtgtagaagtactcgccgatagtggaaaccgacgccccagcactcgtccgagggcaaaggaatagtgaggtacagcttggatcgatccggctgctaacaaagcccgaaaggaagctgagttggctgctgccaccgctgagcaataactagcataaccccttggggcctctaaacgggtcttgaggggttttttgctgaaaggaggaactatatccggatgatcgtcgaggcctcacgtgttaacaagcttgcatgccggtttaaacagtcgaggtcgacggtatcgataagcttgttaacagaagttcctattccgaagttcctattctctagaaagtataggaacttccaccacacaacacaatggcggccaccgcttccagaaccacccgattctcttcttcctcttcacaccccaccttccccaaacgcattactagatccaccctccctctctctcatcaaaccctcaccaaacccaaccacgctctcaaaatcaaatgttccatctccaaaccccccacggcggcgcccttcaccaaggaagcgccgaccacggagcccttcgtgtcacggttcgcctccggcgaacctcgcaagggcgcggacatccttgtggaggcgctggagaggcagggcgtgacgacggtgttcgcgtaccccggcggtgcgtcgatggagatccaccaggcgctcacgcgctccgccgccatccgcaacgtgctcccgcgccacgagcagggcggcgtcttcgccgccgaaggctacgcgcgttcctccggcctccccggcgtctgcattgccacctccggccccggcgccaccaacctcgtgagcggcctcgccgacgctttaatggacagcgtcccagtcgtcgccatcaccggccaggtcgcccgccggatgatcggcaccgacgccttccaagaaaccccgatcgtggaggtgagcagatccatcacgaagcacaactacctcatcctcgacgtcgacgacatcccccgcgtcgtcgccgaggctttcttcgtcgccacctccggccgccccggtccggtcctcatcgacattcccaaagacgttcagcagcaactcgccgtgcctaattgggacgagcccgttaacctccccggttacctcgccaggctgcccaggccccccgccgaggcccaattggaacacattgtcagactcatcatggaggcccaaaagcccgttctctacgtcggcggtggcagtttgaattccagtgctgaattgaggcgctttgttgaactcactggtattcccgttgctagcactttaatgggtcttggaacttttcctattggtgatgaatattcccttcagatgctgggtatgcatggtactgtttatgctaactatgctgttgacaatagtgatttgttgcttgcctttggggtaaggtttgatgaccgtgttactgggaagcttgaggcttttgctagtagggctaagattgttcacattgatattgattctgccgagattgggaagaacaagcaggcgcacgtgtcggtttgcgcggatttgaagttggccttgaagggaattaatatgattttggaggagaaaggagtggagggtaagtttgatcttggaggttggagagaagagattaatgtgcagaaacacaagtttccattgggttacaagacattccaggacgcgatttctccgcagcatgctatcgaggttcttgatgagttgactaatggagatgctattgttagtactggggttgggcagcatcaaatgtgggctgcgcagttttacaagtacaagagaccgaggcagtggttgacctcagggggtcttggagccatgggttttggattgcctgcggctattggtgctgctgttgctaaccctggggctgttgtggttgacattgatggggatggtagtttcatcatgaatgttcaggagttggccactataagagtggagaatctcccagttaagatattgttgttgaacaatcagcatttgggtatggtggttcagtgggaggataggttctacaagtccaatagagctcacacctatcttggagatccgtctagcgagagcgagatattcccaaacatgctcaagtttgctgatgcttgtgggataccggcagcgcgagtgacgaagaaggaagagcttagagcggcaattcagagaatgttggacacccctggcccctaccttcttgatgtcattgtgccccatcaggagcatgtgttgccgatgattcccagtaatggatccttcaaggatgtgataactgagggtgatggtagaacgaggtactgactagctagtcagttaacctagacttgtccatcttctggattggccaacttaattaatgtatgaaataaaaggatgcacacatagtgacatgctaatcactataatgtgggcatcaaagttgtgtgttatgtgtaattactagttatctgaataaaagagaaagagatcatccatatttcttatcctaaatgaatgtcacgtgtctttataattctttgatgaaccagatgcatttcattaaccaaatccatatacatataaatattaatcatatataattaatatcaattgggttagcaaaacaaatctagtctaggtgtgttttgcccccaagcttatcgataccgtcggcgcggggtacgttagctgattaagtcagcatgcgcggccggcgtatgaactaaaatgcatgtaggtgtaagagctcatggagagcatggaatattgtatccgaccatgtaacagtataataactgagctccatctcacttcttctatgaataaacaaaggatgttatgatatattaacactctatctatgcaccttattgttctatgataaatttcctcttattattataaatcatctgaatcgtgacggcttatggaatgcttcaaatagtacaaaaacaaatgtgtactataagactttctaaacaattctaaccttagcattgtgaacgagacataagtgttaagaagacataacaattataatggaagaagtttgtctccatttatatattatatattacccacttatgtattatattaggatgttaaggagacataacaattataaagagagaagtttgtatccatttatatattatatactacccatttatatattatacttatccacttatttaatgtctttataaggtttgatccatgatatttctaatattttagttgatatgtatatgaaaaggtactatttgaactctcttactctgtataaaggttggatcatccttaaagtgggtctatttaattttattgcttcttacagataaaaaaaaaattatgagttggtttgataaaatattgaaggatttaaaataataataaataacatataatatatgtatataaatttattataatataacatttatctataaaaaagtaaatattgtcataaatctatacaatcgtttagccttgctggaacgaatctcaattatttaaacgagagtaaacatatttgactttttggttatttaacaaattattatttaacactatatgaaatttttttttttatcagcaaagaataaaattaaattaagaaggacaatggtgtcccaatccttatacaaccaacttccacaagaaagtcaagtcagagacaacaaaaaaacaagcaaaggaaattttttaatttgagttgtcttgtttgctgcataatttatgcagtaaaacactacacataacccttttagcagtagagcaatggttgaccgtgtgcttagcttcttttattttatttttttatcagcaaagaataaataaaataaaatgagacacttcagggatgtttcaacaggtacccatcacttaagtggcgcgccgtcgacggatccgtacgatccatgcccttcatttgccgcttattaattaatttggtaacagtccgtactaatcagttacttatccttcccccatcataattaatcttggtagtctcgaatgccacaacactgactagtctcttggatcataagaaaaagccaaggaacaaaagaagacaaaacacaatgagagtatcctttgcatagcaatgtctaagttcataaaattcaaacaaaaacgcaatcacacacagtggacatcacttatccactagctgatcaggatcgccgcgtcaagaaaaaaaaactggaccccaaaagccatgcacaacaacacgtactcacaaaggtgtcaatcgagcagcccaaaacattcaccaactcaacccatcatgagccctcacatttgttgtttctaacccaacctcaaactcgtattctcttccgccacctcatttttgtttatttcaacacccgtcaaactgcatgccaccccgtggccaaatgtccatgcatgttaacaagacctatgactataaatagctgcaatctcggcccaggttttcatcatcaagaaccagttcaatatcctagtacaccgtattaaagaatttaagatatactgcggccgcatgactatcgactcacaatactacaagtcgcgagacaaaaacgacacggcacccaaaatcgcgggaatccgatatgccccgctatcgacaccattactcaaccgatgtgagaccttctctctggtctggcacattttcagcattcccactttcctcacaattttcatgctatgctgcgcaattccactgctctggccatttgtgattgcgtatgtagtgtacgctgttaaagacgactccccgtccaacggaggagtggtcaagcgatactcgcctatttcaagaaacttcttcatctggaagctctttggccgctacttccccataactctgcacaagacggtggatctggagcccacgcacacatactaccctctggacgtccaggagtatcacctgattgctgagagatactggccgcagaacaagtacctccgagcaatcatcaccaccatcgagtactttctgcccgccttcatgaaacggtctctttctatcaacgagcaggagcagcctgccgagcgagatcctctcctgtctcccgtttctcccagctctccgggttctcaacctgacaagtggattaaccacgacagcagatatagccgtggagaatcatctggctccaacggccacgcctcgggctccgaacttaacggcaacggcaacaacggcaccactaaccgacgacctttgtcgtccgcctctgctggctccactgcatctgattccacgcttcttaacgggtccctcaactcctacgccaaccagatcattggcgaaaacgacccacagctgtcgcccacaaaactcaagcccactggcagaaaatacatcttcggctaccacccccacggcattatcggcatgggagcctttggtggaattgccaccgagggagctggatggtccaagctctttccgggcatccctgtttctcttatgactctcaccaacaacttccgagtgcctctctacagagagtacctcatgagtctgggagtcgcttctgtctccaagaagtcctgcaaggccctcctcaagcgaaaccagtctatctgcattgtcgttggtggagcacaggaaagtcttctggccagacccggtgtcatggacctggtgctactcaagcgaaagggttttgttcgacttggtatggaggtcggaaatgtcgcccttgttcccatcatggcctttggtgagaacgacctctatgaccaggttagcaacgacaagtcgtccaagctgtaccgattccagcagtttgtcaagaacttccttggattcacccttcctttgatgcatgcccgaggcgtcttcaactacgatgtcggtcttgtcccctacaggcgacccgtcaacattgtggttggttcccccattgacttgccttatctcccacaccccaccgacgaagaagtgtccgaataccacgaccgatacatcgccgagctgcagcgaatctacaacgagcacaaggatgaatatttcatcgattggaccgaggagggcaaaggagccccagagttccgaatgattgagtaagcggccgcaagtatgaactaaaatgcatgtaggtgtaagagctcatggagagcatggaatattgtatccgaccatgtaacagtataataactgagctccatctcacttcttctatgaataaacaaaggatgttatgatatattaacactctatctatgcaccttattgttctatgataaatttcctcttattattataaatcatctgaatcgtgacggcttatggaatgcttcaaatagtacaaaaacaaatgtgtactataagactttctaaacaattctaaccttagcattgtgaacgagacataagtgttaagaagacataacaattataatggaagaagtttgtctccatttatatattatatattacccacttatgtattatattaggatgttaaggagacataacaattataaagagagaagtttgtatccatttatatattatatactacccatttatatattatacttatccacttatttaatgtctttataaggtttgatccatgatatttctaatattttagttgatatgtatatgaaaaggtactatttgaactctcttactctgtataaaggttggatcatccttaaagtgggtctatttaattttattgcttcttacagataaaaaaaaaattatgagttggtttgataaaatattgaaggatttaaaataataataaataacatataatatatgtatataaatttattataatataacatttatctataaaaaagtaaatattgtcataaatctatacaatcgtttagccttgctggaacgaatctcaattatttaaacgagagtaaacatatttgactttttggttatttaacaaattattatttaacactatatgaaatttttttttttatcagcaaagaataaaattaaattaagaaggacaatggtgtcccaatccttatacaaccaacttccacaagaaagtcaagtcagagacaacaaaaaaacaagcaaaggaaattttttaatttgagttgtcttgtttgctgcataatttatgcagtaaaacactacacataacccttttagcagtagagcaatggttgaccgtgtgcttagcttcttttattttatttttttatcagcaaagaataaataaaataaaatgagacacttcagggatgtttcaacgtacgtctttccacaatacataactattaattaatcttaaataaataaaggataaaatatttttttttcttcataaagttaaaatatgttattttttgtttagatgtatattcgaataaatctaaatatatgataatgattttttatattgattaaacatataatcaatattaaatatgatatttttttatataggttgtacacataattttataaggataaaaaatatgataaaaataaattttaaatatttttatatttacgagaaaaaaaaatattttagccataaataaatgaccagcatattttacaaccttagtaattcataaattcctatatgtatatttgaaattaaaaacagataatcgttaagggaaggaatcctacgtcatctcttgccatttgtttttcatgcaaacagaaagggacgaaaaaccacctcaccatgaatcactcttcacaccatttttactagcaaacaagtctcaacaactgaagccagctctctttccgtttctttttacaacactttctttgaaatagtagtattttttttcacatgatttattaacgtgccaaaagatgcttattgaatagagtgcacatttgtaatgtactactaattagaacatgaaaaagcattgttctaacacgataatcctgtgaaggcgttaactccaaagatccaatttcactatataaattgtgacgaaagcaaaatgaattcacatagctgagagagaaaggaaaggttaactaagaagcaatacttcagcggccgcttctagctagctagggtttgggtagtgagtgtaataaagttgcaaagtttttggttaggttacgttttgaccttattattatagttcaaagggaaacattaattaaaggggattatgaagtgggctctcttgattcttggatgaggatcttactgggtgaattgagctgcttagctatggatcccacagttctacccatcaataagtgcttttgtggtagtcttgtggcttccatatctggggagcttcatttgcctttatagtattaaccttctccaagaacaaagagagcccacacccttctcttcttttctctcataataatttaaatttgttatagactctaaactttaaatgttttttttgaagtttttccgtttttctcttttgccatgatcccgttcttgctgtggagtaaccttgtccgaggtatgtgcatgattagatccatacttaatttgtgtgcatcacgaaggtgaggttgaaatgaactttgcttttttgaccttttaggaaagttcttttgttgcagtaatcaattttaattagttttaattgacactattacttttattgtcatctttgttagttttattgttgaattgagtgcatatttcctaggaaattctcttacctaacattttttatacagatctatgctcttggctcttgcccttactcttggccttgtgttggttatttgtctacatatttattgactggtcgatgagacatgtcacaattcttgggcttatttgttggtctaataaaaggagtgcttattgaaagatcaagacggagattcggttttatataaataaactaaagatgacatattagtgtgttgatgtctcttcaggataatttttgtttgaaataatatggtaatgtcttgtctaaatttgtgtacataattcttactgattttttggattgttggatttttataaacaaatctgcggccgcatgagccgtaaaggttcaatacaacgagtgcttgttttcttagggacaagcattgtacttatgtatgattctgtgtaaccatgagtcttccacgttgtactaatgtgaagggcaaaaataaaacacagaacaagttcgtttttctcaaataatgtgaaggtagaaaatggaaccatgcctcctctcttgcatgtgatttaaaatattagcagatggtacgtcgagtcgacctgcaggtcgactcgacgtacgtcctcgaagagaagggttaataacacattttttaacatttttaacacaaattttagttatttaaaaatttattaaaaaatttaaaataagaagaggaactctttaaataaatctaacttacaaaatttatgatttttaataagttttcaccaataaaaaatgtcataaaaatatgttaaaaagtatattatcaatattctctttatgataaataaaaagaaaaaaaaaataaaagttaagtgaaaatgagattgaagtgactttaggtgtgtataaatatatcaaccccgccaacaatttatttaatccaaatatattgaagtatattattccatagcctttatttatttatatatttattatataaaagctttatttgttctaggttgttcatgaaatatttttttggttttatctccgttgtaagaaaatcatgtgctttgtgtcgccactcactattgcagctttttcatgcattggtcagattgacggttgattgtatttttgttttttatggttttgtgttatgacttaagtcttcatctctttatctcttcatcaggtttgatggttacctaatatggtccatgggtacatgcatggttaaattaggtggccaactttgttgtgaacgatagaattttttttatattaagtaaactatttttatattatgaaataataataaaaaaaatattttatcattattaacaaaatcatattagttaatttgttaactctataataaaagaaatactgtaacattcacattacatggtaacatctttccaccctttcatttgttttttgtttgatgactttttttcttgtttaaatttatttcccttcttttaaatttggaatacattatcatcatatataaactaaaatactaaaaacaggattacacaaatgataaataataacacaaatatttataaatctagctgcaatatatttaaactagctatatcgatattgtaaaataaaactagctgcattgatactgataaaaaaatatcatgtgctttctggactgatgatgcagtatacttttgacattgcctttattttatttttcagaaaagctttcttagttctgggttcttcattatttgtttcccatctccattgtgaattgaatcatttgcttcgtgtcacaaatacaatttagntaggtacatgcattggtcagattcacggtttattatgtcatgacttaagttcatggtagtacattacctgccacgcatgcattatattggttagatttgataggcaaatttggttgtcaacaatataaatataaataatgtttttatattacgaaataacagtgatcaaaacaaacagttttatctttattaacaagattttgtttttgtttgatgacgttttttaatgtttacgctttcccccttcttttgaatttagaacactttatcatcataaaatcaaatactaaaaaaattacatatttcataaataataacacaaatatttttaaaaaatctgaaataataatgaacaatattacatattatcacgaaaattcattaataaaaatattatataaataaaatgtaatagtagttatatgtaggaaaaaagtactgcacgcataatatatacaaaaagattaaaatgaactattataaataataacactaaattaatggtgaatcatatcaaaataatgaaaaagtaaataaaatttgtaattaacttctatatgtattacacacacaaataataaataatagtaaaaaaaattatgataaatatttaccatctcataagatatttaaaataatgataaaaatatagattattttttatgcaactagctagccaaaaagagaacacgggtatatataaaaagagtacctttaaattctactgtacttcctttattcctgacgtttttatatcaagtggacatacgtgaagattttaattatcagtctaaatatttcattagcacttaatacttttctgttttattcctatcctataagtagtcccgattctcccaacattgcttattcacacaactaactaagaaagtcttccatagccccccaagcggccgctagtcgactaagtcatcaactattccaagctacgtatttgggagtttgtggagtacagcaagatgatatacctagacggtgatatccaagtttttgacaacattgaccacttgtttgacttgcctgataactacttctatgcggtgatggactgtttctgtgagccaacttggggccacactaaacaatatcagatcggttactgccagcagtgcccccataaggttcagtggcccactcactttgggcccaaacctcctctctatttcaatgctggcatgtttgtgtatgagcccaatttggctacttaccgtgacctccttcaaacagtccaagtcacccagcccacttcctttgctgaacaggattttttgaacatgtacttcaaggacaaatataggccaattcctaatgtctacaatcttgtgctggccatgctgtggcgtcaccctgagaacgttgagcttgacaaagttaaagtggttcactactgtgctgctgggtctaagccttggaggtacactgggaagtgactcgaggtcatcaattactccaagctacgtatttgggagttcgtggagtacaagaagacgatatacctagacggtgacatccaagtatttggaaacatagaccacttgtttgatctgcctgataattatttctatgcggtgatggattgtttctgcgagaagacttggagccacacccctcagttccagattgggtactgccaacagtgccctgataaggttcaatggccctctcactttggttccaaacctcctctatatttcaatgctggcatgtttgtttatgagcctaatctcgacacctaccgtgatcttctccaaactgtccaactcaccaagcccacttcttttgctgagcaggactttctcaacatgtacttcaaggacaagtacaagccaataccgaacatgtacaaccttgtgctggccatgttgtggcgtcaccctgaaaatgttgaacttgataaagttcaagtggttcattactgtgctgctgggtctaagccttggaggttcactgggaagtaactgcaggtcatcaactactccaagctccgtatatgggagtttgtggagtacagcaagatgatatacttggacggagacattgaggtatatgagaacatagaccacctatttgacctacctgatggtaacttttacgctgtgatggattgtttctgcgagaagacatggagtcacacccctcagtacaaggtgggttactgccagcaatgcccggagaaggtgcggtggcccaccgaattgggtcagcccccttctctttacttcaacgctggcatgttcgtgttcgaacccaacatcgccacctatcatgacctattgaaaacggtgcaagtcaccactcccacctcgttcgctgaacaagatttcttgaacatgtacttcaaggacatttacaagccaatccctttaaattacaatcttgtcctcgccatgctgtggcgccacccggaaaacgttaaattagaccaagtcaaggttgttcactattgcgcagcggggtccaagccatggagatatacggggaagtagcctaggcgtacgcaggtaagtttctgcttctacctttgatatatatataataattatcattaattagtagtaatataatatttcaaatatttttttcaaaataaaagaatgtagtatatagcaattgcttttctgtagtttataagtgtgtatattttaatttataacttttctaatatatgaccaaaacatggtgatgtgcaggtcctaggctacttccccgtatatctccatggcttggaccccgctgcgcaatagtgaacaaccttgacttggtctaatttaacgttttccgggtggcgccacagcatggcgaggacaagattgtaatttaaagggattggcttgtaaatgtccttgaagtacatgttcaagaaatcttgttcagcgaacgaggtgggagtggtgacttgcaccgttttcaataggtcatgataggtggcgatgttgggttcgaacacgaacatgccagcgttgaagtaaagagaagggggctgacccaattcggtgggccaccgcaccttctccgggcattgctggcagtaacccaccttgtactgaggggtgtgactccatgtcttctcgcagaaacaatccatcacagcgtaaaagttaccatcaggtaggtcaaataggtggtctatgttctcatatacctcaatgtctccgtccaagtatatcatcttgctgtactccacaaactcccatatacggagcttggagtagttgatgacctgcagttacttcccagtgaacctccaaggcttagacccagcagcacagtaatgaaccacttgaactttatcaagttcaacattttcagggtgacgccacaacatggccagcacaaggttgtacatgttcggtattggcttgtacttgtccttgaagtacatgttgagaaagtcctgctcagcaaaagaagtgggcttggtgagttggacagtttggagaagatcacggtaggtgtcgagattaggctcataaacaaacatgccagcattgaaatatagaggaggtttggaaccaaagtgagagggccattgaaccttatcagggcactgttggcagtacccaatctggaactgaggggtgtggctccaagtcttctcgcagaaacaatccatcaccgcatagaaataattatcaggcagatcaaacaagtggtctatgtttccaaatacttggatgtcaccgtctaggtatatcgtcttcttgtactccacgaactcccaaatacgtagcttggagtaattgatgacctcgagtcacttcccagtgtacctccaaggcttagacccagcagcacagtagtgaaccactttaactttgtcaagctcaacgttctcagggtgacgccacagcatggccagcacaagattgtagacattaggaattggcctatatttgtccttgaagtacatgttcaaaaaatcctgttcagcaaaggaagtgggctgggtgacttggactgtttgaaggaggtcacggtaagtagccaaattgggctcatacacaaacatgccagcattgaaatagagaggaggtttgggcccaaagtgagtgggccactgaaccttatgggggcactgctggcagtaaccgatctgatattgtttagtgtggccccaagttggctcacagaaacagtccatcaccgcatagaagtagttatcaggcaagtcaaacaagtggtcaatgttgtcaaaaacttggatatcaccgtctaggtatatcatcttgctgtactccacaaactcccaaatacgtagcttggaatagttgatgacttagtcgactagcggccgcgacacaagtgtgagagtactaaataaatgctttggttgtacgaaatcattacactaaataaaataatcaaagcttatatatgccttccgctaaggccgaatgcaaagaaattggttctttctcgttatcttttgccacttttactagtacgtattaattactacttaatcatctttgtttacggctcattatatccggtctaggccaaggccgcgaagttaaaagcaatgttgtcacttgtacgtactaacacatgatgtgatagtttatgctagctagctataacataagctgtctctgagtgtgttgtatattaataaagatcatcactggtgaatggtgatcgtgtacgtaccctacttagtaggcaatggaagcacttagagtgtgctttgtgcatggccttgcctctgttttgagacttttgtaatgttttcgagtttaaatctttgcctttgcgtacgtgggcggatcccctgca

SEQ ID NO: 20 - DNA, 4860 bp, artificial sequence
  expression plamid QC292
gatccaacaatgccccagttcgacatcctctgcaagaccccccccaaggtgctcgtgaggcagttcgtggagaggttcgagaggccctccggcgagaagatcgccctctgcgccgccgagctcacctacctctgctggatgatcacccacaacggcaccgccattaagagggccaccttcatgtcatacaacaccatcatctccaactccctctccttcgacatcgtgaacaagtccctccagttcaaatacaagacccagaaggccaccatcctcgaggcctccctcaagaagctcatccccgcctgggagttcaccatcatcccctactacggccagaagcaccagtccgacatcaccgacatcgtgtcatccctccagcttcagttcgagtcctccgaggaggctgacaagggcaactcccactccaagaagatgctgaaggccctcctctccgagggcgagtccatctgggagatcaccgagaagatcctcaactccttcgagtacacctccaggttcactaagaccaagaccctctaccagttcctcttcctcgccaccttcatcaactgcggcaggttctcagacatcaagaacgtggaccccaagtccttcaagctcgtgcagaacaagtacctcggcgtgatcatccagtgcctcgtgaccgagaccaagacctccgtgtccaggcacatctacttcttctccgctcgcggcaggatcgaccccctcgtgtacctcgacgagttcctcaggaactcagagcccgtgctcaagagggtgaacaggaccggcaactcctcctccaacaagcaggagtaccagctcctcaaggacaacctcgtgaggtcctacaacaaggccctcaagaagaacgccccctactccatcttcgccatcaagaacggccccaagtcccacatcggtaggcacctcatgacctccttcctctcaatgaagggcctcaccgagctcaccaacgtggtgggcaactggtccgacaagagggcctccgccgtggccaggaccacctacacccaccagatcaccgccatccccgaccactacttcgccctcgtgtcaaggtactacgcctacgaccccatctccaaggagatgatcgccctcaaggacgagactaaccccatcgaggagtggcagcacatcgagcagctcaagggctccgccgagggctccatcaggtaccccgcctggaacggcatcatctcccaggaggtgctcgactacctctcctcctacatcaacaggaggatctgagttaacctagacttgtccatcttctggattggccaacttaattaatgtatgaaataaaaggatgcacacatagtgacatgctaatcactataatgtgggcatcaaagttgtgtgttatgtgtaattactagttatctgaataaaagagaaagagatcatccatatttcttatcctaaatgaatgtcacgtgtctttataattctttgatgaaccagatgcatttcattaaccaaatccatatacatataaatattaatcatatataattaatatcaattgggttagcaaaacaaatctagtctaggtgtgttttgcgaatgcggccgcgatctggggaattcgtaatcatggtcatagctgtttcctgtgtgaaattgttatccgctcacaattccacacaacatacgagccggaagcataaagtgtaaagcctggggtgcctaatgagtgagctaactcacattaattgcgttgcgctcactgcccgctttccagtcgggaaacctgtcgtgccagctgcattaatgaatcggccaacgcgcggggagaggcggtttgcgtattgggcgctcttccgcttcctcgctcactgactcgctgcgctcggtcgttcggctgcggcgagcggtatcagctcactcaaaggcggtaatacggttatccacagaatcaggggataacgcaggaaagaacatgtgagcaaaaggccagcaaaaggccaggaaccgtaaaaaggccgcgttgctggcgtttttccataggctccgcccccctgacgagcatcacaaaaatcgacgctcaagtcagaggtggcgaaacccgacaggactataaagataccaggcgtttccccctggaagctccctcgtgcgctctcctgttccgaccctgccgcttaccggatacctgtccgcctttctcccttcgggaagcgtggcgctttctcatagctcacgctgtaggtatctcagttcggtgtaggtcgttcgctccaagctgggctgtgtgcacgaaccccccgttcagcccgaccgctgcgccttatccggtaactatcgtcttgagtccaacccggtaagacacgacttatcgccactggcagcagccactggtaacaggattagcagagcgaggtatgtaggcggtgctacagagttcttgaagtggtggcctaactacggctacactagaaggacagtatttggtatctgcgctctgctgaagccagttaccttcggaaaaagagttggtagctcttgatccggcaaacaaaccaccgctggtagcggtggtttttttgtttgcaagcagcagattacgcgcagaaaaaaaggatctcaagaagatcctttgatcttttctacggggtctgacgctcagtggaacgaaaactcacgttaagggattttggtcatgagattatcaaaaaggatcttcacctagatccttttaaattaaaaatgaagttttaaatcaatctaaagtatatatgagtaaacttggtctgacagttaccaatgcttaatcagtgaggcacctatctcagcgatctgtctatttcgttcatccatagttgcctgactccccgtcgtgtagataactacgatacgggagggcttaccatctggccccagtgctgcaatgataccgcgagacccacgctcaccggctccagatttatcagcaataaaccagccagccggaagggccgagcgcagaagtggtcctgcaactttatccgcctccatccagtctattaattgttgccgggaagctagagtaagtagttcgccagttaatagtttgcgcaacgttgttgccattgctacaggcatcgtggtgtcacgctcgtcgtttggtatggcttcattcagctccggttcccaacgatcaaggcgagttacatgatcccccatgttgtgcaaaaaagcggttagctccttcggtcctccgatcgttgtcagaagtaagttggccgcagtgttatcactcatggttatggcagcactgcataattctcttactgtcatgccatccgtaagatgcttttctgtgactggtgagtactcaaccaagtcattctgagaatagtgtatgcggcgaccgagttgctcttgcccggcgtcaatacgggataataccgcgccacatagcagaactttaaaagtgctcatcattggaaaacgttcttcggggcgaaaactctcaaggatcttaccgctgttgagatccagttcgatgtaacccactcgtgcacccaactgatcttcagcatcttttactttcaccagcgtttctgggtgagcaaaaacaggaaggcaaaatgccgcaaaaaagggaataagggcgacacggaaatgttgaatactcatactcttcctttttcaatattattgaagcatttatcagggttattgtctcatgagcggatacatatttgaatgtatttagaaaaataaacaaataggggttccgcgcacatttccccgaaaagtgccacctgacgtctaagaaaccattattatcatgacattaacctataaaaataggcgtatcacgaggccctttcgtctcgcgcgtttcggtgatgacggtgaaaacctctgacacatgcagctcccggagacggtcacagcttgtctgtaagcggatgccgggagcagacaagcccgtcagggcgcgtcagcgggtgttggcgggtgtcggggctggcttaactatgcggcatcagagcagattgtactgagagtgcaccatatgcggtgtgaaataccgcacagatgcgtaaggagaaaataccgcatcaggcgccattcgccattcaggctgcgcaactgttgggaagggcgatcggtgcgggcctcttcgctattacgccagctggcgaaagggggatgtgctgcaaggcgattaagttgggtaacgccagggttttcccagtcacgacgttgtaaaacgacggccagtgccaagcttgcatgcctgcaggtttaaacagtcgactctagagatccgtcaacatggtggagcacgacactctcgtctactccaagaatatcaaagatacagtctcagaagaccaaagggctattgagacttttcaacaaagggtaatatcgggaaacctcctcggattccattgcccagctatctgtcacttcatcaaaaggacagtagaaaaggaaggtggcacctacaaatgccatcattgcgataaaggaaaggctatcgttcaagatgcctctgccgacagtggtcccaaagatggacccccacccacgaggagcatcgtggaaaaagaagacgttccaaccacgtcttcaaagcaagtggattgatgtgatgatcctatgcgtatggtatgacgtgtgttcaagatgatgacttcaaacctacctatgacgtatggtatgacgtgtgtcgactgatgacttagatccactcgagcggctataaatacgtacctacgcaccctgcgctaccatccctagagctgcagcttatttttacaacaattaccaacaacaacaaacaacaaacaacattacaattactatttacaattacagtcgacccgg

SEQ ID NO: 21 - DNA, 4747 bp, artificial sequence
  QC608 (PHP44664)
gtgttaacaagcttgcatgcctgcaggtttaaacagtcgactctagagatccgtcaacatggtggagcacgacactctcgtctactccaagaatatcaaagatacagtctcagaagaccaaagggctattgagacttttcaacaaagggtaatatcgggaaacctcctcggattccattgcccagctatctgtcacttcatcaaaaggacagtagaaaaggaaggtggcacctacaaatgccatcattgcgataaaggaaaggctatcgttcaagatgcctctgccgacagtggtcccaaagatggacccccacccacgaggagcatcgtggaaaaagaagacgttccaaccacgtcttcaaagcaagtggattgatgtgatgatcctatgcgtatggtatgacgtgtgttcaagatgatgacttcaaacctacctatgacgtatggtatgacgtgtgtcgactgatgacttagatccactcgagcggctataaatacgtacctacgcaccctgcgctaccatccctagagctgcagcttatttttacaacaattaccaacaacaacaaacaacaaacaacattacaattactatttacaattacagtcgacccgggatccaacaatgccccagttcgacatcctctgcaagaccccccccaaggtgctcgtgaggcagttcgtggagaggttcgagaggccctccggcgagaagatcgccctctgcgccgccgagctcacctacctctgctggatgatcacccacaacggcaccgccattaagagggccaccttcatgtcatacaacaccatcatctccaactccctctccttcgacatcgtgaacaagtccctccagttcaaatacaagacccagaaggccaccatcctcgaggcctccctcaagaagctcatccccgcctgggagttcaccatcatcccctactacggccagaagcaccagtccgacatcaccgacatcgtgtcatccctccagcttcagttcgagtcctccgaggaggctgacaagggcaactcccactccaagaagatgctgaaggccctcctctccgagggcgagtccatctgggagatcaccgagaagatcctcaactccttcgagtacacctccaggttcactaagaccaagaccctctaccagttcctcttcctcgccaccttcatcaactgcggcaggttctcagacatcaagaacgtggaccccaagtccttcaagctcgtgcagaacaagtacctcggcgtgatcatccagtgcctcgtgaccgagaccaagacctccgtgtccaggcacatctacttcttctccgctcgcggcaggatcgaccccctcgtgtacctcgacgagttcctcaggaactcagagcccgtgctcaagagggtgaacaggaccggcaactcctcctccaacaagcaggagtaccagctcctcaaggacaacctcgtgaggtcctacaacaaggccctcaagaagaacgccccctactccatcttcgccatcaagaacggccccaagtcccacatcggtaggcacctcatgacctccttcctctcaatgaagggcctcaccgagctcaccaacgtggtgggcaactggtccgacaagagggcctccgccgtggccaggaccacctacacccaccagatcaccgccatccccgaccactacttcgccctcgtgtcaaggtactacgcctacgaccccatctccaaggagatgatcgccctcaaggacgagactaaccccatcgaggagtggcagcacatcgagcagctcaagggctccgccgagggctccatcaggtaccccgcctggaacggcatcatctcccaggaggtgctcgactacctctcctcctacatcaacaggaggatctgagttaacctagacttgtccatcttctggattggccaacttaattaatgtatgaaataaaaggatgcacacatagtgacatgctaatcactataatgtgggcatcaaagttgtgtgttatgtgtaattactagttatctgaataaaagagaaagagatcatccatatttcttatcctaaatgaatgtcacgtgtctttataattctttgatgaaccagatgcatttcattaaccaaatccatatacatataaatattaatcatatataattaatatcaattgggttagcaaaacaaatctagtctaggtgtgttttgcgaatgcggccgctcgagttctatagtgtcacctaaatcgtatgtgtatgatacataaggttatgtattaattgtagccgcgttctaacgacaatatgtccatatggtgcactctcagtacaatctgctctgatgccgcatagttaagccagccccgacacccgccaacacccgctgacgcgccctgacgggcttgtctgctcccggcatccgcttacagacaagctgtgaccgtctccgggagctgcatgtgtcagaggttttcaccgtcatcaccgaaacgcgcgagacgaaagggcctcgtgatacgcctatttttataggttaatgtcatgaccaaaatcccttaacgtgagttttcgttccactgagcgtcagaccccgtagaaaagatcaaaggatcttcttgagatcctttttttctgcgcgtaatctgctgcttgcaaacaaaaaaaccaccgctaccagcggtggtttgtttgccggatcaagagctaccaactctttttccgaaggtaactggcttcagcagagcgcagataccaaatactgtccttctagtgtagccgtagttaggccaccacttcaagaactctgtagcaccgcctacatacctcgctctgctaatcctgttaccagtggctgctgccagtggcgataagtcgtgtcttaccgggttggactcaagacgatagttaccggataaggcgcagcggtcgggctgaacggggggttcgtgcacacagcccagcttggagcgaacgacctacaccgaactgagatacctacagcgtgagcattgagaaagcgccacgcttcccgaagggagaaaggcggacaggtatccggtaagcggcagggtcggaacaggagagcgcacgagggagcttccagggggaaacgcctggtatctttatagtcctgtcgggtttcgccacctctgacttgagcgtcgatttttgtgatgctcgtcaggggggcggagcctatggaaaaacgccagcaacgcggcctttttacggttcctggccttttgctggccttttgctcacatgttctttcctgcgttatcccctgattctgtggataaccgtattaccgcctttgagtgagctgataccgctcgccgcagccgaacgaccgagcgcagcgagtcagtgagcgaggaagcggaagagcgcccaatacgcaaaccgcctctccccgcgcgttggccgattcattaatgcaggttgatcagatctcgatcccgcgaaattaatacgactcactatagggagaccacaacggtttccctctagaaataattttgtttaactttaagaaggagatatacccatggaaaagcctgaactcaccgcgacgtctgtcgagaagtttctgatcgaaaagttcgacagcgtctccgacctgatgcagctctcggagggcgaagaatctcgtgctttcagcttcgatgtaggagggcgtggatatgtcctgcgggtaaatagctgcgccgatggtttctacaaagatcgttatgtttatcggcactttgcatcggccgcgctcccgattccggaagtgcttgacattggggaattcagcgagagcctgacctattgcatctcccgccgtgcacagggtgtcacgttgcaagacctgcctgaaaccgaactgcccgctgttctgcagccggtcgcggaggctatggatgcgatcgctgcggccgatcttagccagacgagcgggttcggcccattcggaccgcaaggaatcggtcaatacactacatggcgtgatttcatatgcgcgattgctgatccccatgtgtatcactggcaaactgtgatggacgacaccgtcagtgcgtccgtcgcgcaggctctcgatgagctgatgctttgggccgaggactgccccgaagtccggcacctcgtgcacgcggatttcggctccaacaatgtcctgacggacaatggccgcataacagcggtcattgactggagcgaggcgatgttcggggattcccaatacgaggtcgccaacatcttcttctggaggccgtggttggcttgtatggagcagcagacgcgctacttcgagcggaggcatccggagcttgcaggatcgccgcggctccgggcgtatatgctccgcattggtcttgaccaactctatcagagcttggttgacggcaatttcgatgatgcagcttgggcgcagggtcgatgcgacgcaatcgtccgatccggagccgggactgtcgggcgtacacaaatcgcccgcagaagcgcggccgtctggaccgatggctgtgtagaagtactcgccgatagtggaaaccgacgccccagcactcgtccgagggcaaaggaatagtgaggtacagcttggatcgatccggctgctaacaaagcccgaaaggaagctgagttggctgctgccaccgctgagcaataactagcataaccccttggggcctctaaacgggtcttgaggggttttttgctgaaaggaggaactatatccggatgatcgtcgaggcctcac

SEQ ID NO: 22 - DNA, 15646 bp, artificial sequence
  recombination product frt1/frt87 Target line A and PHP50573
  misc_feature (10686)..(10686): n is a, c, g, or t
agatccgtcaacatggtggagcacgacactctcgtctactccaagaatatcaaagatacagtctcagaagaccaaagggctattgagacttttcaacaaagggtaatatcgggaaacctcctcggattccattgcccagctatctgtcacttcatcaaaaggacagtagaaaaggaaggtggcacctacaaatgccatcattgcgataaaggaaaggctatcgttcaagatgcctctgccgacagtggtcccaaagatggacccccacccacgaggagcatcgtggaaaaagaagacgttccaaccacgtcttcaaagcaagtggattgatgtgatgatcctatgcgtatggtatgacgtgtgttcaagatgatgacttcaaacctacctatgacgtatggtatgacgtgtgtcgactgatgacttagatccactcgagcggctataaatacgtacctacgcaccctgcgctaccatccctagagctgcagcttatttttacaacaattaccaacaacaacaaacaacaaacaacattacaattactatttacaattacagtcgacccaacagaagttcctattccgaagttcctattctctagaaagtataggaacttccaccacacaacacaatggcggccaccgcttccagaaccacccgattctcttcttcctcttcacaccccaccttccccaaacgcattactagatccaccctccctctctctcatcaaaccctcaccaaacccaaccacgctctcaaaatcaaatgttccatctccaaaccccccacggcggcgcccttcaccaaggaagcgccgaccacggagcccttcgtgtcacggttcgcctccggcgaacctcgcaagggcgcggacatccttgtggaggcgctggagaggcagggcgtgacgacggtgttcgcgtaccccggcggtgcgtcgatggagatccaccaggcgctcacgcgctccgccgccatccgcaacgtgctcccgcgccacgagcagggcggcgtcttcgccgccgaaggctacgcgcgttcctccggcctccccggcgtctgcattgccacctccggccccggcgccaccaacctcgtgagcggcctcgccgacgctttaatggacagcgtcccagtcgtcgccatcaccggccaggtcgcccgccggatgatcggcaccgacgccttccaagaaaccccgatcgtggaggtgagcagatccatcacgaagcacaactacctcatcctcgacgtcgacgacatcccccgcgtcgtcgccgaggctttcttcgtcgccacctccggccgccccggtccggtcctcatcgacattcccaaagacgttcagcagcaactcgccgtgcctaattgggacgagcccgttaacctccccggttacctcgccaggctgcccaggccccccgccgaggcccaattggaacacattgtcagactcatcatggaggcccaaaagcccgttctctacgtcggcggtggcagtttgaattccagtgctgaattgaggcgctttgttgaactcactggtattcccgttgctagcactttaatgggtcttggaacttttcctattggtgatgaatattcccttcagatgctgggtatgcatggtactgtttatgctaactatgctgttgacaatagtgatttgttgcttgcctttggggtaaggtttgatgaccgtgttactgggaagcttgaggcttttgctagtagggctaagattgttcacattgatattgattctgccgagattgggaagaacaagcaggcgcacgtgtcggtttgcgcggatttgaagttggccttgaagggaattaatatgattttggaggagaaaggagtggagggtaagtttgatcttggaggttggagagaagagattaatgtgcagaaacacaagtttccattgggttacaagacattccaggacgcgatttctccgcagcatgctatcgaggttcttgatgagttgactaatggagatgctattgttagtactggggttgggcagcatcaaatgtgggctgcgcagttttacaagtacaagagaccgaggcagtggttgacctcagggggtcttggagccatgggttttggattgcctgcggctattggtgctgctgttgctaaccctggggctgttgtggttgacattgatggggatggtagtttcatcatgaatgttcaggagttggccactataagagtggagaatctcccagttaagatattgttgttgaacaatcagcatttgggtatggtggttcagtgggaggataggttctacaagtccaatagagctcacacctatcttggagatccgtctagcgagagcgagatattcccaaacatgctcaagtttgctgatgcttgtgggataccggcagcgcgagtgacgaagaaggaagagcttagagcggcaattcagagaatgttggacacccctggcccctaccttcttgatgtcattgtgccccatcaggagcatgtgttgccgatgattcccagtaatggatccttcaaggatgtgataactgagggtgatggtagaacgaggtactgactagctagtcagttaacctagacttgtccatcttctggattggccaacttaattaatgtatgaaataaaaggatgcacacatagtgacatgctaatcactataatgtgggcatcaaagttgtgtgttatgtgtaattactagttatctgaataaaagagaaagagatcatccatatttcttatcctaaatgaatgtcacgtgtctttataattctttgatgaaccagatgcatttcattaaccaaatccatatacatataaatattaatcatatataattaatatcaattgggttagcaaaacaaatctagtctaggtgtgttttgcccccaagcttatcgataccgtcggcgcggggtacgttagctgattaagtcagcatgcgcggccggcgtatgaactaaaatgcatgtaggtgtaagagctcatggagagcatggaatattgtatccgaccatgtaacagtataataactgagctccatctcacttcttctatgaataaacaaaggatgttatgatatattaacactctatctatgcaccttattgttctatgataaatttcctcttattattataaatcatctgaatcgtgacggcttatggaatgcttcaaatagtacaaaaacaaatgtgtactataagactttctaaacaattctaaccttagcattgtgaacgagacataagtgttaagaagacataacaattataatggaagaagtttgtctccatttatatattatatattacccacttatgtattatattaggatgttaaggagacataacaattataaagagagaagtttgtatccatttatatattatatactacccatttatatattatacttatccacttatttaatgtctttataaggtttgatccatgatatttctaatattttagttgatatgtatatgaaaaggtactatttgaactctcttactctgtataaaggttggatcatccttaaagtgggtctatttaattttattgcttcttacagataaaaaaaaaattatgagttggtttgataaaatattgaaggatttaaaataataataaataacatataatatatgtatataaatttattataatataacatttatctataaaaaagtaaatattgtcataaatctatacaatcgtttagccttgctggaacgaatctcaattatttaaacgagagtaaacatatttgactttttggttatttaacaaattattatttaacactatatgaaatttttttttttatcagcaaagaataaaattaaattaagaaggacaatggtgtcccaatccttatacaaccaacttccacaagaaagtcaagtcagagacaacaaaaaaacaagcaaaggaaattttttaatttgagttgtcttgtttgctgcataatttatgcagtaaaacactacacataacccttttagcagtagagcaatggttgaccgtgtgcttagcttcttttattttatttttttatcagcaaagaataaataaaataaaatgagacacttcagggatgtttcaacaggtacccatcacttaagtggcgcgccgtcgacggatccgtacgatccatgcccttcatttgccgcttattaattaatttggtaacagtccgtactaatcagttacttatccttcccccatcataattaatcttggtagtctcgaatgccacaacactgactagtctcttggatcataagaaaaagccaaggaacaaaagaagacaaaacacaatgagagtatcctttgcatagcaatgtctaagttcataaaattcaaacaaaaacgcaatcacacacagtggacatcacttatccactagctgatcaggatcgccgcgtcaagaaaaaaaaactggaccccaaaagccatgcacaacaacacgtactcacaaaggtgtcaatcgagcagcccaaaacattcaccaactcaacccatcatgagccctcacatttgttgtttctaacccaacctcaaactcgtattctcttccgccacctcatttttgtttatttcaacacccgtcaaactgcatgccaccccgtggccaaatgtccatgcatgttaacaagacctatgactataaatagctgcaatctcggcccaggttttcatcatcaagaaccagttcaatatcctagtacaccgtattaaagaatttaagatatactgcggccgcatgactatcgactcacaatactacaagtcgcgagacaaaaacgacacggcacccaaaatcgcgggaatccgatatgccccgctatcgacaccattactcaaccgatgtgagaccttctctctggtctggcacattttcagcattcccactttcctcacaattttcatgctatgctgcgcaattccactgctctggccatttgtgattgcgtatgtagtgtacgctgttaaagacgactccccgtccaacggaggagtggtcaagcgatactcgcctatttcaagaaacttcttcatctggaagctctttggccgctacttccccataactctgcacaagacggtggatctggagcccacgcacacatactaccctctggacgtccaggagtatcacctgattgctgagagatactggccgcagaacaagtacctccgagcaatcatcaccaccatcgagtactttctgcccgccttcatgaaacggtctctttctatcaacgagcaggagcagcctgccgagcgagatcctctcctgtctcccgtttctcccagctctccgggttctcaacctgacaagtggattaaccacgacagcagatatagccgtggagaatcatctggctccaacggccacgcctcgggctccgaacttaacggcaacggcaacaacggcaccactaaccgacgacctttgtcgtccgcctctgctggctccactgcatctgattccacgcttcttaacgggtccctcaactcctacgccaaccagatcattggcgaaaacgacccacagctgtcgcccacaaaactcaagcccactggcagaaaatacatcttcggctaccacccccacggcattatcggcatgggagcctttggtggaattgccaccgagggagctggatggtccaagctctttccgggcatccctgtttctcttatgactctcaccaacaacttccgagtgcctctctacagagagtacctcatgagtctgggagtcgcttctgtctccaagaagtcctgcaaggccctcctcaagcgaaaccagtctatctgcattgtcgttggtggagcacaggaaagtcttctggccagacccggtgtcatggacctggtgctactcaagcgaaagggttttgttcgacttggtatggaggtcggaaatgtcgcccttgttcccatcatggcctttggtgagaacgacctctatgaccaggttagcaacgacaagtcgtccaagctgtaccgattccagcagtttgtcaagaacttccttggattcacccttcctttgatgcatgcccgaggcgtcttcaactacgatgtcggtcttgtcccctacaggcgacccgtcaacattgtggttggttcccccattgacttgccttatctcccacaccccaccgacgaagaagtgtccgaataccacgaccgatacatcgccgagctgcagcgaatctacaacgagcacaaggatgaatatttcatcgattggaccgaggagggcaaaggagccccagagttccgaatgattgagtaagcggccgcaagtatgaactaaaatgcatgtaggtgtaagagctcatggagagcatggaatattgtatccgaccatgtaacagtataataactgagctccatctcacttcttctatgaataaacaaaggatgttatgatatattaacactctatctatgcaccttattgttctatgataaatttcctcttattattataaatcatctgaatcgtgacggcttatggaatgcttcaaatagtacaaaaacaaatgtgtactataagactttctaaacaattctaaccttagcattgtgaacgagacataagtgttaagaagacataacaattataatggaagaagtttgtctccatttatatattatatattacccacttatgtattatattaggatgttaaggagacataacaattataaagagagaagtttgtatccatttatatattatatactacccatttatatattatacttatccacttatttaatgtctttataaggtttgatccatgatatttctaatattttagttgatatgtatatgaaaaggtactatttgaactctcttactctgtataaaggttggatcatccttaaagtgggtctatttaattttattgcttcttacagataaaaaaaaaattatgagttggtttgataaaatattgaaggatttaaaataataataaataacatataatatatgtatataaatttattataatataacatttatctataaaaaagtaaatattgtcataaatctatacaatcgtttagccttgctggaacgaatctcaattatttaaacgagagtaaacatatttgactttttggttatttaacaaattattatttaacactatatgaaatttttttttttatcagcaaagaataaaattaaattaagaaggacaatggtgtcccaatccttatacaaccaacttccacaagaaagtcaagtcagagacaacaaaaaaacaagcaaaggaaattttttaatttgagttgtcttgtttgctgcataatttatgcagtaaaacactacacataacccttttagcagtagagcaatggttgaccgtgtgcttagcttcttttattttatttttttatcagcaaagaataaataaaataaaatgagacacttcagggatgtttcaacgtacgtctttccacaatacataactattaattaatcttaaataaataaaggataaaatatttttttttcttcataaagttaaaatatgttattttttgtttagatgtatattcgaataaatctaaatatatgataatgattttttatattgattaaacatataatcaatattaaatatgatatttttttatataggttgtacacataattttataaggataaaaaatatgataaaaataaattttaaatatttttatatttacgagaaaaaaaaatattttagccataaataaatgaccagcatattttacaaccttagtaattcataaattcctatatgtatatttgaaattaaaaacagataatcgttaagggaaggaatcctacgtcatctcttgccatttgtttttcatgcaaacagaaagggacgaaaaaccacctcaccatgaatcactcttcacaccatttttactagcaaacaagtctcaacaactgaagccagctctctttccgtttctttttacaacactttctttgaaatagtagtattttttttcacatgatttattaacgtgccaaaagatgcttattgaatagagtgcacatttgtaatgtactactaattagaacatgaaaaagcattgttctaacacgataatcctgtgaaggcgttaactccaaagatccaatttcactatataaattgtgacgaaagcaaaatgaattcacatagctgagagagaaaggaaaggttaactaagaagcaatacttcagcggccgcttctagctagctagggtttgggtagtgagtgtaataaagttgcaaagtttttggttaggttacgttttgaccttattattatagttcaaagggaaacattaattaaaggggattatgaagtgggctctcttgattcttggatgaggatcttactgggtgaattgagctgcttagctatggatcccacagttctacccatcaataagtgcttttgtggtagtcttgtggcttccatatctggggagcttcatttgcctttatagtattaaccttctccaagaacaaagagagcccacacccttctcttcttttctctcataataatttaaatttgttatagactctaaactttaaatgttttttttgaagtttttccgtttttctcttttgccatgatcccgttcttgctgtggagtaaccttgtccgaggtatgtgcatgattagatccatacttaatttgtgtgcatcacgaaggtgaggttgaaatgaactttgcttttttgaccttttaggaaagttcttttgttgcagtaatcaattttaattagttttaattgacactattacttttattgtcatctttgttagttttattgttgaattgagtgcatatttcctaggaaattctcttacctaacattttttatacagatctatgctcttggctcttgcccttactcttggccttgtgttggttatttgtctacatatttattgactggtcgatgagacatgtcacaattcttgggcttatttgttggtctaataaaaggagtgcttattgaaagatcaagacggagattcggttttatataaataaactaaagatgacatattagtgtgttgatgtctcttcaggataatttttgtttgaaataatatggtaatgtcttgtctaaatttgtgtacataattcttactgattttttggattgttggatttttataaacaaatctgcggccgcatgagccgtaaaggttcaatacaacgagtgcttgttttcttagggacaagcattgtacttatgtatgattctgtgtaaccatgagtcttccacgttgtactaatgtgaagggcaaaaataaaacacagaacaagttcgtttttctcaaataatgtgaaggtagaaaatggaaccatgcctcctctcttgcatgtgatttaaaatattagcagatggtacgtcgagtcgacctgcaggtcgactcgacgtacgtcctcgaagagaagggttaataacacattttttaacatttttaacacaaattttagttatttaaaaatttattaaaaaatttaaaataagaagaggaactctttaaataaatctaacttacaaaatttatgatttttaataagttttcaccaataaaaaatgtcataaaaatatgttaaaaagtatattatcaatattctctttatgataaataaaaagaaaaaaaaaataaaagttaagtgaaaatgagattgaagtgactttaggtgtgtataaatatatcaaccccgccaacaatttatttaatccaaatatattgaagtatattattccatagcctttatttatttatatatttattatataaaagctttatttgttctaggttgttcatgaaatatttttttggttttatctccgttgtaagaaaatcatgtgctttgtgtcgccactcactattgcagctttttcatgcattggtcagattgacggttgattgtatttttgttttttatggttttgtgttatgacttaagtcttcatctctttatctcttcatcaggtttgatggttacctaatatggtccatgggtacatgcatggttaaattaggtggccaactttgttgtgaacgatagaattttttttatattaagtaaactatttttatattatgaaataataataaaaaaaatattttatcattattaacaaaatcatattagttaatttgttaactctataataaaagaaatactgtaacattcacattacatggtaacatctttccaccctttcatttgttttttgtttgatgactttttttcttgtttaaatttatttcccttcttttaaatttggaatacattatcatcatatataaactaaaatactaaaaacaggattacacaaatgataaataataacacaaatatttataaatctagctgcaatatatttaaactagctatatcgatattgtaaaataaaactagctgcattgatactgataaaaaaatatcatgtgctttctggactgatgatgcagtatacttttgacattgcctttattttatttttcagaaaagctttcttagttctgggttcttcattatttgtttcccatctccattgtgaattgaatcatttgcttcgtgtcacaaatacaatttagntaggtacatgcattggtcagattcacggtttattatgtcatgacttaagttcatggtagtacattacctgccacgcatgcattatattggttagatttgataggcaaatttggttgtcaacaatataaatataaataatgtttttatattacgaaataacagtgatcaaaacaaacagttttatctttattaacaagattttgtttttgtttgatgacgttttttaatgtttacgctttcccccttcttttgaatttagaacactttatcatcataaaatcaaatactaaaaaaattacatatttcataaataataacacaaatatttttaaaaaatctgaaataataatgaacaatattacatattatcacgaaaattcattaataaaaatattatataaataaaatgtaatagtagttatatgtaggaaaaaagtactgcacgcataatatatacaaaaagattaaaatgaactattataaataataacactaaattaatggtgaatcatatcaaaataatgaaaaagtaaataaaatttgtaattaacttctatatgtattacacacacaaataataaataatagtaaaaaaaattatgataaatatttaccatctcataagatatttaaaataatgataaaaatatagattattttttatgcaactagctagccaaaaagagaacacgggtatatataaaaagagtacctttaaattctactgtacttcctttattcctgacgtttttatatcaagtggacatacgtgaagattttaattatcagtctaaatatttcattagcacttaatacttttctgttttattcctatcctataagtagtcccgattctcccaacattgcttattcacacaactaactaagaaagtcttccatagccccccaagcggccgctagtcgactaagtcatcaactattccaagctacgtatttgggagtttgtggagtacagcaagatgatatacctagacggtgatatccaagtttttgacaacattgaccacttgtttgacttgcctgataactacttctatgcggtgatggactgtttctgtgagccaacttggggccacactaaacaatatcagatcggttactgccagcagtgcccccataaggttcagtggcccactcactttgggcccaaacctcctctctatttcaatgctggcatgtttgtgtatgagcccaatttggctacttaccgtgacctccttcaaacagtccaagtcacccagcccacttcctttgctgaacaggattttttgaacatgtacttcaaggacaaatataggccaattcctaatgtctacaatcttgtgctggccatgctgtggcgtcaccctgagaacgttgagcttgacaaagttaaagtggttcactactgtgctgctgggtctaagccttggaggtacactgggaagtgactcgaggtcatcaattactccaagctacgtatttgggagttcgtggagtacaagaagacgatatacctagacggtgacatccaagtatttggaaacatagaccacttgtttgatctgcctgataattatttctatgcggtgatggattgtttctgcgagaagacttggagccacacccctcagttccagattgggtactgccaacagtgccctgataaggttcaatggccctctcactttggttccaaacctcctctatatttcaatgctggcatgtttgtttatgagcctaatctcgacacctaccgtgatcttctccaaactgtccaactcaccaagcccacttcttttgctgagcaggactttctcaacatgtacttcaaggacaagtacaagccaataccgaacatgtacaaccttgtgctggccatgttgtggcgtcaccctgaaaatgttgaacttgataaagttcaagtggttcattactgtgctgctgggtctaagccttggaggttcactgggaagtaactgcaggtcatcaactactccaagctccgtatatgggagtttgtggagtacagcaagatgatatacttggacggagacattgaggtatatgagaacatagaccacctatttgacctacctgatggtaacttttacgctgtgatggattgtttctgcgagaagacatggagtcacacccctcagtacaaggtgggttactgccagcaatgcccggagaaggtgcggtggcccaccgaattgggtcagcccccttctctttacttcaacgctggcatgttcgtgttcgaacccaacatcgccacctatcatgacctattgaaaacggtgcaagtcaccactcccacctcgttcgctgaacaagatttcttgaacatgtacttcaaggacatttacaagccaatccctttaaattacaatcttgtcctcgccatgctgtggcgccacccggaaaacgttaaattagaccaagtcaaggttgttcactattgcgcagcggggtccaagccatggagatatacggggaagtagcctaggcgtacgcaggtaagtttctgcttctacctttgatatatatataataattatcattaattagtagtaatataatatttcaaatatttttttcaaaataaaagaatgtagtatatagcaattgcttttctgtagtttataagtgtgtatattttaatttataacttttctaatatatgaccaaaacatggtgatgtgcaggtcctaggctacttccccgtatatctccatggcttggaccccgctgcgcaatagtgaacaaccttgacttggtctaatttaacgttttccgggtggcgccacagcatggcgaggacaagattgtaatttaaagggattggcttgtaaatgtccttgaagtacatgttcaagaaatcttgttcagcgaacgaggtgggagtggtgacttgcaccgttttcaataggtcatgataggtggcgatgttgggttcgaacacgaacatgccagcgttgaagtaaagagaagggggctgacccaattcggtgggccaccgcaccttctccgggcattgctggcagtaacccaccttgtactgaggggtgtgactccatgtcttctcgcagaaacaatccatcacagcgtaaaagttaccatcaggtaggtcaaataggtggtctatgttctcatatacctcaatgtctccgtccaagtatatcatcttgctgtactccacaaactcccatatacggagcttggagtagttgatgacctgcagttacttcccagtgaacctccaaggcttagacccagcagcacagtaatgaaccacttgaactttatcaagttcaacattttcagggtgacgccacaacatggccagcacaaggttgtacatgttcggtattggcttgtacttgtccttgaagtacatgttgagaaagtcctgctcagcaaaagaagtgggcttggtgagttggacagtttggagaagatcacggtaggtgtcgagattaggctcataaacaaacatgccagcattgaaatatagaggaggtttggaaccaaagtgagagggccattgaaccttatcagggcactgttggcagtacccaatctggaactgaggggtgtggctccaagtcttctcgcagaaacaatccatcaccgcatagaaataattatcaggcagatcaaacaagtggtctatgtttccaaatacttggatgtcaccgtctaggtatatcgtcttcttgtactccacgaactcccaaatacgtagcttggagtaattgatgacctcgagtcacttcccagtgtacctccaaggcttagacccagcagcacagtagtgaaccactttaactttgtcaagctcaacgttctcagggtgacgccacagcatggccagcacaagattgtagacattaggaattggcctatatttgtccttgaagtacatgttcaaaaaatcctgttcagcaaaggaagtgggctgggtgacttggactgtttgaaggaggtcacggtaagtagccaaattgggctcatacacaaacatgccagcattgaaatagagaggaggtttgggcccaaagtgagtgggccactgaaccttatgggggcactgctggcagtaaccgatctgatattgtttagtgtggccccaagttggctcacagaaacagtccatcaccgcatagaagtagttatcaggcaagtcaaacaagtggtcaatgttgtcaaaaacttggatatcaccgtctaggtatatcatcttgctgtactccacaaactcccaaatacgtagcttggaatagttgatgacttagtcgactagcggccgcgacacaagtgtgagagtactaaataaatgctttggttgtacgaaatcattacactaaataaaataatcaaagcttatatatgccttccgctaaggccgaatgcaaagaaattggttctttctcgttatcttttgccacttttactagtacgtattaattactacttaatcatctttgtttacggctcattatatccggtctaggccaaggccgcgaagttaaaagcaatgttgtcacttgtacgtactaacacatgatgtgatagtttatgctagctagctataacataagctgtctctgagtgtgttgtatattaataaagatcatcactggtgaatggtgatcgtgtacgtaccctacttagtaggcaatggaagcacttagagtgtgctttgtgcatggccttgcctctgttttgagacttttgtaatgttttcgagtttaaatctttgcctttgcgtacgtgggcggatcccctgcaggagatccaagcttggcgcgccggaattaattaggtaatttcacgcgccggatccttaattaagtctagagtcgactgtttaattctagtggccggcccagctgatgatcccggtgaagttcctattccgaagttcctattctccagaaagtataggaacttc

SEQ ID NO: 23 - DNA, 9644 bp, artificial sequence
  plasmid pKR1776
ggcccaagcggccgcaagtatgaactaaaatgcatgtaggtgtaagagctcatggagagcatggaatattgtatccgaccatgtaacagtataataactgagctccatctcacttcttctatgaataaacaaaggatgttatgatatattaacactctatctatgcaccttattgttctatgataaatttcctcttattattataaatcatctgaatcgtgacggcttatggaatgcttcaaatagtacaaaaacaaatgtgtactataagactttctaaacaattctaaccttagcattgtgaacgagacataagtgttaagaagacataacaattataatggaagaagtttgtctccatttatatattatatattacccacttatgtattatattaggatgttaaggagacataacaattataaagagagaagtttgtatccatttatatattatatactacccatttatatattatacttatccacttatttaatgtctttataaggtttgatccatgatatttctaatattttagttgatatgtatatgaaagggtactatttgaactctcttactctgtataaaggttggatcatccttaaagtgggtctatttaattttattgcttcttacagataaaaaaaaaattatgagttggtttgataaaatattgaaggatttaaaataataataaataacatataatatatgtatataaatttattataatataacatttatctataaaaaagtaaatattgtcataaatctatacaatcgtttagccttgctggacgaatctcaattatttaaacgagagtaaacatatttgactttttggttatttaacaaattattatttaacactatatgaaatttttttttttatcagcaaagaataaaattaaattaagaaggacaatggtgtcccaatccttatacaaccaacttccacaagaaagtcaagtcagagacaacaaaaaaacaagcaaaggaaattttttaatttgagttgtcttgtttgctgcataatttatgcagtaaaacactacacataacccttttagcagtagagcaatggttgaccgtgtgcttagcttcttttattttatttttttatcagcaaagaataaataaaataaaatgagacacttcagggatgtttcaacaagcttggcgcgccgttctatagtgtcacctaaatcgtatgtgtatgatacataaggttatgtattaattgtagccgcgttctaacgacaatatgtccatatggtgcactctcagtacaatctgctctgatgccgcatagttaagccagccccgacacccgccaacacccgctgacgcgccctgacgggcttgtctgctcccggcatccgcttacagacaagctgtgaccgtctccgggagctgcatgtgtcagaggttttcaccgtcatcaccgaaacgcgcgagacgaaagggcctcgtgatacgcctatttttataggttaatgtcatgaccaaaatcccttaacgtgagttttcgttccactgagcgtcagaccccgtagaaaagatcaaaggatcttcttgagatcctttttttctgcgcgtaatctgctgcttgcaaacaaaaaaaccaccgctaccagcggtggtttgtttgccggatcaagagctaccaactctttttccgaaggtaactggcttcagcagagcgcagataccaaatactgtccttctagtgtagccgtagttaggccaccacttcaagaactctgtagcaccgcctacatacctcgctctgctaatcctgttaccagtggctgctgccagtggcgataagtcgtgtcttaccgggttggactcaagacgatagttaccggataaggcgcagcggtcgggctgaacggggggttcgtgcacacagcccagcttggagcgaacgacctacaccgaactgagatacctacagcgtgagcattgagaaagcgccacgcttcccgaagggagaaaggcggacaggtatccggtaagcggcagggtcggaacaggagagcgcacgagggagcttccagggggaaacgcctggtatctttatagtcctgtcgggtttcgccacctctgacttgagcgtcgatttttgtgatgctcgtcaggggggcggagcctatggaaaaacgccagcaacgcggcctttttacggttcctggccttttgctggccttttgctcacatgttctttcctgcgttatcccctgattctgtggataaccgtattaccgcctttgagtgagctgataccgctcgccgcagccgaacgaccgagcgcagcgagtcagtgagcgaggaagcggaagagcgcccaatacgcaaaccgcctctccccgcgcgttggccgattcattaatgcaggttgatcgattcgacatcgatctagtaacatagatgacaccgcgcgcgataatttatcctagtttgcgcgctatattttgttttctatcgcgtattaaatgtataattgcgggactctaatcataaaaacccatctcataaataacgtcatgcattacatgttaattattacatgcttaacgtaattcaacagaaattatatgataatcatcgcaagaccggcaacaggattcaatcttaagaaactttattgccaaatgtttgaacgatctgcttcgacgcactccttctttaggtacctcactattcctttgccctcggacgagtgctggggcgtcggtttccactatcggcgagtacttctacacagccatcggtccagacggccgcgcttctgcgggcgatttgtgtacgcccgacagtcccggctccggatcggacgattgcgtcgcatcgaccctgcgcccaagctgcatcatcgaaattgccgtcaaccaagctctgatagagttggtcaagaccaatgcggagcatatacgcccggagccgcggcgatcctgcaagctccggatgcctccgctcgaagtagcgcgtctgctgctccatacaagccaaccacggcctccagaagaagatgttggcgacctcgtattgggaatccccgaacatcgcctcgctccagtcaatgaccgctgttatgcggccattgtccgtcaggacattgttggagccgaaatccgcgtgcacgaggtgccggacttcggggcagtcctcggcccaaagcatcagctcatcgagagcctgcgcgacggacgcactgacggtgtcgtccatcacagtttgccagtgatacacatggggatcagcaatcgcgcatatgaaatcacgccatgtagtgtattgaccgattccttgcggtccgaatgggccgaacccgctcgtctggctaagatcggccgcagcgatcgcatccatggcctccgcgaccggctgcagaacagcgggcagttcggtttcaggcaggtcttgcaacgtgacaccctgtgcacggcgggagatgcaataggtcaggctctcgctgaattccccaatgtcaagcacttccggaatcgggagcgcggccgatgcaaagtgccgataaacataacgatctttgtagaaaccatcggcgcagctatttacccgcaggacatatccacgccctcctacatcgaagctgaaagcacgagattcttcgccctccgagagctgcatcaggtcggagacgctgtcgaacttttcgatcagaaacttctcgacagacgtcgcggtgagttcaggctttttcatggtttaataagaagagaaaagagttcttttgttatggctgaagtaatagagaaatgagctcgagcgtgtcctctccaaatgaaatgaacttccttatatagaggaagggtcttgcgaaggatagtgggattgtgcgtcatcccttacgtcagtggagatgtcacatcaatccacttgctttgaagacgtggttggaacgtcttctttttccacgatgctcctcgtgggtgggggtccatctttgggaccactgtcggcagaggcatcttgaatgatagcctttcctttatcgcaatgatggcatttgtaggagccaccttccttttctactgtcctttcgatgaagtgacagatagctgggcaatggaatccgaggaggtttcccgaaattatcctttgttgaaaagtctcaatagccctttggtcttctgagactgtatctttgacatttttggagtagaccagagtgtcgtgctccaccatgttgacgaagattttcttcttgtcattgagtcgtaaaagactctgtatgaactgttcgccagtcttcacggcgagttctgttagatcctcgatttgaatcttagactccatgcatggccttagattcagtaggaactacctttttagagactccaatctctattacttgccttggtttatgaagcaagccttgaatcgtccatactggaatagtacttctgatcttgagaaatatgtctttctctgtgttcttgatgcaattagtcctgaatcttttgactgcatctttaaccttcttgggaaggtatttgatctcctggagattgttactcgggtagatcgtcttgatgagacctgctgcgtaggcctctctaaccatctgtgggtcagcattctttctgaaattgaagaggctaaccttctcattatcagtggtgaacatagtgtcgtcaccttcaccttcgaacttccttcctagatcgtaaagatagaggaaatcgtccattgtaatctccggggcaaaggagatctcttttggggctggatcactgctgggccttttggttcctagcgtgagccagtgggctttttgctttggtgggcttgttagggccttagcaaagctcttgggcttgagttgagcttctcctttggggatgaagttcaacctgtctgtttgctgacttgttgtgtacgcgtcagctgctgctcttgcctctgtaatagtggcaaatttcttgtgtgcaactccgggaacgccgtttgttgccgcctttgtacaaccccagtcatcgtatataccggcatgtggaccgttatacacaacgtagtagttgatatgagggtgttgaatacccgattctgctctgagaggagcaactgtgctgttaagctcagatttttgtgggattggaattggatcgatctcgatcccgcgaaattaatacgactcactatagggagaccacaacggtttccctctagaaataattttgtttaactttaagaaggagatatacccatggaaaagcctgaactcaccgcgacgtctgtcgagaagtttctgatcgaaaagttcgacagcgtctccgacctgatgcagctctcggagggcgaagaatctcgtgctttcagcttcgatgtaggagggcgtggatatgtcctgcgggtaaatagctgcgccgatggtttctacaaagatcgttatgtttatcggcactttgcatcggccgcgctcccgattccggaagtgcttgacattggggaattcagcgagagcctgacctattgcatctcccgccgtgcacagggtgtcacgttgcaagacctgcctgaaaccgaactgcccgctgttctgcagccggtcgcggaggctatggatgcgatcgctgcggccgatcttagccagacgagcgggttcggcccattcggaccgcaaggaatcggtcaatacactacatggcgtgatttcatatgcgcgattgctgatccccatgtgtatcactggcaaactgtgatggacgacaccgtcagtgcgtccgtcgcgcaggctctcgatgagctgatgctttgggccgaggactgccccgaagtccggcacctcgtgcacgcggatttcggctccaacaatgtcctgacggacaatggccgcataacagcggtcattgactggagcgaggcgatgttcggggattcccaatacgaggtcgccaacatcttcttctggaggccgtggttggcttgtatggagcagcagacgcgctacttcgagcggaggcatccggagcttgcaggatcgccgcggctccgggcgtatatgctccgcattggtcttgaccaactctatcagagcttggttgacggcaatttcgatgatgcagcttgggcgcagggtcgatgcgacgcaatcgtccgatccggagccgggactgtcgggcgtacacaaatcgcccgcagaagcgcggccgtctggaccgatggctgtgtagaagtactcgccgatagtggaaaccgacgccccagcactcgtccgagggcaaaggaatagtgaggtacagcttggatcgatccggctgctaacaaagcccgaaaggaagctgagttggctgctgccaccgctgagcaataactagcataaccccttggggcctctaaacgggtcttgaggggttttttgctgaaaggaggaactatatccggatgatcgggcgcgccgtcgacggatccgtacgagatccggccggccagatcctgcaggagatccaagcttttgatccatgcccttcatttgccgcttattaattaatttggtaacagtccgtactaatcagttacttatccttcccccatcataattaatcttggtagtctcgaatgccacaacactgactagtctcttggatcataagaaaaagccaaggaacaaaagaagacaaaacacaatgagagtatcctttgcatagcaatgtctaagttcataaaattcaaacaaaaacgcaatcacacacagtggacatcacttatccactagctgatcaggatcgccgcgtcaagaaaaaaaaactggaccccaaaagccatgcacaacaacacgtactcacaaaggtgtcaatcgagcagcccaaaacattcaccaactcaacccatcatgagccctcacatttgttgtttctaacccaacctcaaactcgtattctcttccgccacctcatttttgtttatttcaacacccgtcaaactgcatgccaccccgtggccaaatgtccatgcatgttaacaagacctatgactataaatagctgcaatctcggcccaggttttcatcatcaagaaccagttcaatatcctagtacaccgtattaaagaatttaagatatactgcggccgcgcgagaaactttgtatgggcatggttatttctcacttctcaccctcctttactttcttatgctaaatcctccttcccctatatctccaccctcaacccctttttctcattataacttttggtgcctagatggtgtgtgtgtgtgcgcgcgagagatctgagctcaattttcctctctcaagtcctggtcatgctttgagggaaaagggttgaggaacttatgcatcttatatctctccacctccaggattttaagccctagttactcaacccttttccctcagaatatggcaattcaggcttttaattgctttcatttggtaccatcacttgcaagatttcagagtacaaggtgaacacacacatcttcctcttcatcaattctctagtttcatccttatcttttcattcacggtaactctcactaccctctttcatcttataagttataccgggggtgtgatgttgatgagtgtaaattaaatatatgtgatctctttctctggaaaaattttcagtgtgatatacataataatctcttaatctagagattttatggctttgttatatataagcggcgcaagggcgaattctgcagatatccatcacacttgggccgcttctagctagctagggtttgggtagtgagtgtaataaagttgcaaagtttttggttaggttacgttttgaccttattattatagttcaaagggaaacattaattaaaggggattatgaaggtggatgatgcctgattggattgaggatcttactgggtgaattgagctgcttagctatggatcccacagttctacccatcaataagtgcttttgtggtagtcttgtggcttccatatctggggagcttcatttgcctttatagtattaaccttcttccaatccagcatcatccaccacccttctcttcttttctctcataataatttaaatttgttatagactctaaactttaaatgttttttttgaagtttttccgtttttctcttttgccatgatcccgttcttgctgtggagtaaccttgtccgaggtatgtgcatgattagatccatacttaatttgtgtgcatcacgaaggtgaggttgaaatgaactttgcttttttgaccttttaggaaagttcttttgttgcagtaatcaattttaattagttttaattgacactattacttttattgtcatctttgttagttttattgttgaattgagtgcatatttcctaggaaattctcttacctaacattttttatacagatctatgctcttggctcttgcccttactcttggccttgtgttggttatttgtctacatatttattgactggtcgatgagacatgtcacaattcttgggcttatttgttggtctaataaaaggagtgcttattgaaagatcaagacggagattcggttttatataaataaactaaagatgacatattagtgtgttgatgtctcttcaggataatttttgtttgaaataatatggtaatgtcttgtctaaatttgtgtacataattcttactgatttttggattgttggatttttataaacaaatctggggccgcttctagctagctagggtttgggtagtgagtgtaataaagttgcaaagtttttggttaggttacgttttgaccttattattatagttcaaagggaaacattaattaaaggggattatgaagtgggctctcttgattcttggatgaggatcttactgggtgaattgagctgcttagctatggatcccacagttctacccatcaataagtgcttttgtggtagtcttgtggcttccatatctggggagcttcatttgcctttatagtattaaccttctccaagaacaaagagagcccacacccttctcttcttttctctcataataatttaaatttgttatagactctaaactttaaatgttttttttgaagtttttccgtttttctcttttgccatgatcccgttcttgctgtggagtaaccttgtccgaggtatgtgcatgattagatccatacttaatttgtgtgcatcacgaaggtgaggttgaaatgaactttgcttttttgaccttttaggaaagttcttttgttgcagtaatcaattttaattagttttaattgacactattacttttattgtcatctttgttagttttattgttgaattgagtgcatatttcctaggaaattctcttacctaacattttttatacagatctatgctcttggctcttgcccttactcttggccttgtgttggttatttgtctacatatttattgactggtcgatgagacatgtcacaattcttgggcttatttgttggtctaataaaaggagtgcttattgaaagatcaagacggagattcggttttatataaataaactaaagatgacatattagtgtgttgatgtctcttcaggataatttttgtttgaaataatatggtaatgtcttgtctaaatttgtgtacataattcttactgattttttggattgttggatttttataaacaaatctgg

SEQ ID NO: 24 - DNA, 6124 bp, artificial sequence
  plasmid-pKR1896
ggccgcatgagccgtaaaggttcaatacaacgagtgcttgttttcttagggacaagcattgtacttatgtatgattctgtgtaaccatgagtcttccacgttgtactaatgtgaagggcaaaaataaaacacagaacaagttcgtttttctcaaataatgtgaaggtagaaaatggaaccatgcctcctctcttgcatgtgatttaaaatattagcagatggtacgtcgagtcgacctgcaggagatccaagcttggcgcgccgttctatagtgtcacctaaatcgtatgtgtatgatacataaggttatgtattaattgtagccgcgttctaacgacaatatgtccatatggtgcactctcagtacaatctgctctgatgccgcatagttaagccagccccgacacccgccaacacccgctgacgcgccctgacgggcttgtctgctcccggcatccgcttacagacaagctgtgaccgtctccgggagctgcatgtgtcagaggttttcaccgtcatcaccgaaacgcgcgagacgaaagggcctcgtgatacgcctatttttataggttaatgtcatgaccaaaatcccttaacgtgagttttcgttccactgagcgtcagaccccgtagaaaagatcaaaggatcttcttgagatcctttttttctgcgcgtaatctgctgcttgcaaacaaaaaaaccaccgctaccagcggtggtttgtttgccggatcaagagctaccaactctttttccgaaggtaactggcttcagcagagcgcagataccaaatactgtccttctagtgtagccgtagttaggccaccacttcaagaactctgtagcaccgcctacatacctcgctctgctaatcctgttaccagtggctgctgccagtggcgataagtcgtgtcttaccgggttggactcaagacgatagttaccggataaggcgcagcggtcgggctgaacggggggttcgtgcacacagcccagcttggagcgaacgacctacaccgaactgagatacctacagcgtgagcattgagaaagcgccacgcttcccgaagggagaaaggcggacaggtatccggtaagcggcagggtcggaacaggagagcgcacgagggagcttccagggggaaacgcctggtatctttatagtcctgtcgggtttcgccacctctgacttgagcgtcgatttttgtgatgctcgtcaggggggcggagcctatggaaaaacgccagcaacgcggcctttttacggttcctggccttttgctggccttttgctcacatgttctttcctgcgttatcccctgattctgtggataaccgtattaccgcctttgagtgagctgataccgctcgccgcagccgaacgaccgagcgcagcgagtcagtgagcgaggaagcggaagagcgcccaatacgcaaaccgcctctccccgcgcgttggccgattcattaatgcaggttgatcagatctcgatcccgcgaaattaatacgactcactatagggagaccacaacggtttccctctagaaataattttgtttaactttaagaaggagatatacccatggaaaagcctgaactcaccgcgacgtctgtcgagaagtttctgatcgaaaagttcgacagcgtctccgacctgatgcagctctcggagggcgaagaatctcgtgctttcagcttcgatgtaggagggcgtggatatgtcctgcgggtaaatagctgcgccgatggtttctacaaagatcgttatgtttatcggcactttgcatcggccgcgctcccgattccggaagtgcttgacattggggaattcagcgagagcctgacctattgcatctcccgccgtgcacagggtgtcacgttgcaagacctgcctgaaaccgaactgcccgctgttctgcagccggtcgcggaggctatggatgcgatcgctgcggccgatcttagccagacgagcgggttcggcccattcggaccgcaaggaatcggtcaatacactacatggcgtgatttcatatgcgcgattgctgatccccatgtgtatcactggcaaactgtgatggacgacaccgtcagtgcgtccgtcgcgcaggctctcgatgagctgatgctttgggccgaggactgccccgaagtccggcacctcgtgcacgcggatttcggctccaacaatgtcctgacggacaatggccgcataacagcggtcattgactggagcgaggcgatgttcggggattcccaatacgaggtcgccaacatcttcttctggaggccgtggttggcttgtatggagcagcagacgcgctacttcgagcggaggcatccggagcttgcaggatcgccgcggctccgggcgtatatgctccgcattggtcttgaccaactctatcagagcttggttgacggcaatttcgatgatgcagcttgggcgcagggtcgatgcgacgcaatcgtccgatccggagccgggactgtcgggcgtacacaaatcgcccgcagaagcgcggccgtctggaccgatggctgtgtagaagtactcgccgatagtggaaaccgacgccccagcactcgtccgagggcaaaggaatagtgaggtacagcttggatcgatccggctgctaacaaagcccgaaaggaagctgagttggctgctgccaccgctgagcaataactagcataaccccttggggcctctaaacgggtcttgaggggttttttgctgaaaggaggaactatatccggatgatcgggcgcgccgtcgacggatccgtacgtctttccacaatacataactattaattaatcttaaataaataaaggataaaatatttttttttcttcataaagttaaaatatgttattttttgtttagatgtatattcgaataaatctaaatatatgataatgattttttatattgattaaacatataatcaatattaaatatgatatttttttatataggttgtacacataattttataaggataaaaaatatgataaaaataaattttaaatatttttatatttacgagaaaaaaaaatattttagccataaataaatgaccagcatattttacaaccttagtaattcataaattcctatatgtatatttgaaattaaaaacagataatcgttaagggaaggaatcctacgtcatctcttgccatttgtttttcatgcaaacagaaagggacgaaaaaccacctcaccatgaatcactcttcacaccatttttactagcaaacaagtctcaacaactgaagccagctctctttccgtttctttttacaacactttctttgaaatagtagtattttttttcacatgatttattaacgtgccaaaagatgcttattgaatagagtgcacatttgtaatgtactactaattagaacatgaaaaagcattgttctaacacgataatcctgtgaaggcgttaactccaaagatccaatttcactatataaattgtgacgaaagcaaaatgaattcacatagctgagagagaaaggaaaggttaactaagaagcaatacttcagcggccgcgcgagaaactttgtatgggcatggttatttctcacttctcaccctcctttactttcttatgctaaatcctccttcccctatatctccaccctcaacccctttttctcattataacttttggtgcctagatggtgtgtgtgtgtgcgcgcgagagatctgagctcaattttcctctctcaagtcctggtcatgctttgagggaaaagggttgaggaacttatgcatcttatatctctccacctccaggattttaagccctagttactcaacccttttccctcagaatatggcaattcaggcttttaattgctttcatttggtaccatcacttgcaagatttcagagtacaaggtgaacacacacatcttcctcttcatcaattctctagtttcatccttatcttttcattcacggtaactctcactaccctctttcatcttataagttataccgggggtgtgatgttgatgagtgtaaattaaatatatgtgatctctttctctggaaaaattttcagtgtgatatacataataatctcttaatctagagattttatggctttgttatatataagcggcgcaagggcgaattctgcagatatccatcacacttgggccgcttctagctagctagggtttgggtagtgagtgtaataaagttgcaaagtttttggttaggttacgttttgaccttattattatagttcaaagggaaacattaattaaaggggattatgaaggtggatgatgcctgattggattgaggatcttactgggtgaattgagctgcttagctatggatcccacagttctacccatcaataagtgcttttgtggtagtcttgtggcttccatatctggggagcttcatttgcctttatagtattaaccttcttccaatccagcatcatccaccacccttctcttcttttctctcataataatttaaatttgttatagactctaaactttaaatgttttttttgaagtttttccgtttttctcttttgccatgatcccgttcttgctgtggagtaaccttgtccgaggtatgtgcatgattagatccatacttaatttgtgtgcatcacgaaggtgaggttgaaatgaactttgcttttttgaccttttaggaaagttcttttgttgcagtaatcaattttaattagttttaattgacactattacttttattgtcatctttgttagttttattgttgaattgagtgcatatttcctaggaaattctcttacctaacattttttatacagatctatgctcttggctcttgcccttactcttggccttgtgttggttatttgtctacatatttattgactggtcgatgagacatgtcacaattcttgggcttatttgttggtctaataaaaggagtgcttattgaaagatcaagacggagattcggttttatataaataaactaaagatgacatattagtgtgttgatgtctcttcaggataatttttgtttgaaataatatggtaatgtcttgtctaaatttgtgtacataattcttactgatttttggattgttggatttttataaacaaatctggggccgcttctagctagctagggtttgggtagtgagtgtaataaagttgcaaagtttttggttaggttacgttttgaccttattattatagttcaaagggaaacattaattaaaggggattatgaagtgggctctcttgattcttggatgaggatcttactgggtgaattgagctgcttagctatggatcccacagttctacccatcaataagtgcttttgtggtagtcttgtggcttccatatctggggagcttcatttgcctttatagtattaaccttctccaagaacaaagagagcccacacccttctcttcttttctctcataataatttaaatttgttatagactctaaactttaaatgttttttttgaagtttttccgtttttctcttttgccatgatcccgttcttgctgtggagtaaccttgtccgaggtatgtgcatgattagatccatacttaatttgtgtgcatcacgaaggtgaggttgaaatgaactttgcttttttgaccttttaggaaagttcttttgttgcagtaatcaattttaattagttttaattgacactattacttttattgtcatctttgttagttttattgttgaattgagtgcatatttcctaggaaattctcttacctaacattttttatacagatctatgctcttggctcttgcccttactcttggccttgtgttggttatttgtctacatatttattgactggtcgatgagacatgtcacaattcttgggcttatttgttggtctaataaaaggagtgcttattgaaagatcaagacggagattcggttttatataaataaactaaagatgacatattagtgtgttgatgtctcttcaggataatttttgtttgaaataatatggtaatgtcttgtctaaatttgtgtacataattcttactgattttttggattgttggatttttataaacaaatctggggcccaagc

SEQ ID NO: 25 - DNA, 11611 bp, artificial sequence
  plasmid KS362
  misc_feature (2349)..(2349): n is a, c, g, or t
ggccgcaagtatgaactaaaatgcatgtaggtgtaagagctcatggagagcatggaatattgtatccgaccatgtaacagtataataactgagctccatctcacttcttctatgaataaacaaaggatgttatgatatattaacactctatctatgcaccttattgttctatgataaatttcctcttattattataaatcatctgaatcgtgacggcttatggaatgcttcaaatagtacaaaaacaaatgtgtactataagactttctaaacaattctaaccttagcattgtgaacgagacataagtgttaagaagacataacaattataatggaagaagtttgtctccatttatatattatatattacccacttatgtattatattaggatgttaaggagacataacaattataaagagagaagtttgtatccatttatatattatatactacccatttatatattatacttatccacttatttaatgtctttataaggtttgatccatgatatttctaatattttagttgatatgtatatgaaagggtactatttgaactctcttactctgtataaaggttggatcatccttaaagtgggtctatttaattttattgcttcttacagataaaaaaaaaattatgagttggtttgataaaatattgaaggatttaaaataataataaataacatataatatatgtatataaatttattataatataacatttatctataaaaaagtaaatattgtcataaatctatacaatcgtttagccttgctggacgaatctcaattatttaaacgagagtaaacatatttgactttttggttatttaacaaattattatttaacactatatgaaatttttttttttatcagcaaagaataaaattaaattaagaaggacaatggtgtcccaatccttatacaaccaacttccacaagaaagtcaagtcagagacaacaaaaaaacaagcaaaggaaattttttaatttgagttgtcttgtttgctgcataatttatgcagtaaaacactacacataacccttttagcagtagagcaatggttgaccgtgtgcttagcttcttttattttatttttttatcagcaaagaataaataaaataaaatgagacacttcagggatgtttcaacaagcttggatcctcgaagagaagggttaataacacacttttttaacatttttaacacaaattttagttatttaaaaatttattaaaaaatttaaaataagaagaggaactctttaaataaatctaacttacaaaatttatgatttttaataagttttcaccaataaaaaatgtcataaaaatatgttaaaaagtatattatcaatattctctttatgataaataaaaagaaaaaaaaaataaaagttaagtgaaaatgagattgaagtgactttaggtgtgtataaatatatcaaccccgccaacaatttatttaatccaaatatattgaagtatattattccatagcctttatttatttatatatttattatataaaagctttatttgttctaggttgttcatgaaatatttttttggttttatctccgttgtaagaaaatcatgtgctttgtgtcgccactcactattgcagctttttcatgcattggtcagattgacggttgattgtatttttgttttttatggttttgtgttatgacttaagtcttcatctctttatctcttcatcaggtttgatggttacctaatatggtccatgggtacatgcatggttaaattaggtggccaactttgttgtgaacgatagaattttttttatattaagtaaactatttttatattatgaaataataataaaaaaaatattttatcattattaacaaaatcatattagttaatttgttaactctataataaaagaaatactgtaacattcacattacatggtaacatctttccaccctttcatttgttttttgtttgatgactttttttcttgtttaaatttatttcccttcttttaaatttggaatacattatcatcatatataaactaaaatactaaaaacaggattacacaaatgataaataataacacaaatatttataaatctagctgcaatatatttaaactagctatatcgatattgtaaaataaaactagctgcattgatactgataaaaaaatatcatgtgctttctggactgatgatgcagtatacttttgacattgcctttattttatttttcagaaaagctttcttagttctgggttcttcattatttgtttcccatctccattgtgaattgaatcatttgcttcgtgtcacaaatacaatttagntaggtacatgcattggtcagattcacggtttattatgtcatgacttaagttcatggtagtacattacctgccacgcatgcattatattggttagatttgataggcaaatttggttgtcaacaatataaatataaataatgtttttatattacgaaataacagtgatcaaaacaaacagttttatctttattaacaagattttgtttttgtttgatgacgttttttaatgtttacgctttcccccttcttttgaatttagaacactttatcatcataaaatcaaatactaaaaaaattacatatttcataaataataacacaaatatttttaaaaaatctgaaataataatgaacaatattacatattatcacgaaaattcattaataaaaatattatataaataaaatgtaatagtagttatatgtaggaaaaaagtactgcacgcataatatatacaaaaagattaaaatgaactattataaataataacactaaattaatggtgaatcatatcaaaataatgaaaaagtaaataaaatttgtaattaacttctatatgtattacacacacaaataataaataatagtaaaaaaaattatgataaatatttaccatctcataagatatttaaaataatgataaaaatatagattattttttatgcaactagctagccaaaaagagaacacgggtatatataaaaagagtacctttaaattctactgtacttcctttattcctgacgtttttatatcaagtggacatacgtgaagattttaattatcagtctaaatatttcattagcacttaatacttttctgttttattcctatcctataagtagtcccgattctcccaacattgcttattcacacaactaactaagaaagtcttccatagccccccaagcggcccatggcctcctccgaggacgtcatcaaggagttcatgcgcttcaaggtgcgcatggagggctccgtgaacggccacgagttcgagatcgagggcgagggcgagggccgcccctacgagggcacccagaccgccaagctgaaggtgaccaagggcggccccctgcccttcgcctgggacatcctgtccccccagttccagtacggctccaaggtgtacgtgaagcaccccgccgacatccccgactacaagaagctgtccttccccgagggcttcaagtgggagcgcgtgatgaacttcgaggacggcggcgtggtgaccgtgacccaggactcctccctgcaggacggctccttcatctacaaggtgaagttcatcggcgtgaacttcccctccgacggccccgtaatgcagaagaagactatgggctgggaggcctccaccgagcgcctgtacccccgcgacggcgtgctgaagggcgagatccacaaggccctgaagctgaaggacggcggccactacctggtggagttcaagtccatctacatggccaagaagcccgtgcagctgcccggctactactacgtggactccaagctggacatcacctcccacaacgaggactacaccatcgtggagcagtacgagcgcgccgagggccgccaccacctgttcctgtagcggccggccgcgacacaagtgtgagagtactaaataaatgctttggttgtacgaaatcattacactaaataaaataatcaaagcttatatatgccttccgctaaggccgaatgcaaagaaattggttctttctcgttatcttttgccacttttactagtacgtattaattactacttaatcatctttgtttacggctcattatatccgtcgacggcgcgccgctctagaactagtggatccgtcgacggcgcgcccgatcatccggatatagttcctcctttcagcaaaaaacccctcaagacccgtttagaggccccaaggggttatgctagttattgctcagcggtggcagcagccaactcagcttcctttcgggctttgttagcagccggatcgatccaagctgtacctcactattcctttgccctcggacgagtgctggggcgtcggtttccactatcggcgagtacttctacacagccatcggtccagacggccgcgcttctgcgggcgatttgtgtacgcccgacagtcccggctccggatcggacgattgcgtcgcatcgaccctgcgcccaagctgcatcatcgaaattgccgtcaaccaagctctgatagagttggtcaagaccaatgcggagcatatacgcccggagccgcggcgatcctgcaagctccggatgcctccgctcgaagtagcgcgtctgctgctccatacaagccaaccacggcctccagaagaagatgttggcgacctcgtattgggaatccccgaacatcgcctcgctccagtcaatgaccgctgttatgcggccattgtccgtcaggacattgttggagccgaaatccgcgtgcacgaggtgccggacttcggggcagtcctcggcccaaagcatcagctcatcgagagcctgcgcgacggacgcactgacggtgtcgtccatcacagtttgccagtgatacacatggggatcagcaatcgcgcatatgaaatcacgccatgtagtgtattgaccgattccttgcggtccgaatgggccgaacccgctcgtctggctaagatcggccgcagcgatcgcatccatagcctccgcgaccggctgcagaacagcgggcagttcggtttcaggcaggtcttgcaacgtgacaccctgtgcacggcgggagatgcaataggtcaggctctcgctgaattccccaatgtcaagcacttccggaatcgggagcgcggccgatgcaaagtgccgataaacataacgatctttgtagaaaccatcggcgcagctatttacccgcaggacatatccacgccctcctacatcgaagctgaaagcacgagattcttcgccctccgagagctgcatcaggtcggagacgctgtcgaacttttcgatcagaaacttctcgacagacgtcgcggtgagttcaggcttttccatgggtatatctccttcttaaagttaaacaaaattatttctagagggaaaccgttgtggtctccctatagtgagtcgtattaatttcgcgggatcgagatcgatccaattccaatcccacaaaaatctgagcttaacagcacagttgctcctctcagagcagaatcgggtattcaacaccctcatatcaactactacgttgtgtataacggtccacatgccggtatatacgatgactggggttgtacaaaggcggcaacaaacggcgttcccggagttgcacacaagaaatttgccactattacagaggcaagagcagcagctgacgcgtacacaacaagtcagcaaacagacaggttgaacttcatccccaaaggagaagctcaactcaagcccaagagctttgctaaggccctaacaagcccaccaaagcaaaaagcccactggctcacgctaggaaccaaaaggcccagcagtgatccagccccaaaagagatctcctttgccccggagattacaatggacgatttcctctatctttacgatctaggaaggaagttcgaaggtgaaggtgacgacactatgttcaccactgataatgagaaggttagcctcttcaatttcagaaagaatgctgacccacagatggttagagaggcctacgcagcaggtctcatcaagacgatctacccgagtaacaatctccaggagatcaaataccttcccaagaaggttaaagatgcagtcaaaagattcaggactaattgcatcaagaacacagagaaagacatatttctcaagatcagaagtactattccagtatggacgattcaaggcttgcttcataaaccaaggcaagtaatagagattggagtctctaaaaaggtagttcctactgaatctaaggccatgcatggagtctaagattcaaatcgaggatctaacagaactcgccgtgaagactggcgaacagttcatacagagtcttttacgactcaatgacaagaagaaaatcttcgtcaacatggtggagcacgacactctggtctactccaaaaatgtcaaagatacagtctcagaagaccaaagggctattgagacttttcaacaaaggataatttcgggaaacctcctcggattccattgcccagctatctgtcacttcatcgaaaggacagtagaaaaggaaggtggctcctacaaatgccatcattgcgataaaggaaaggctatcattcaagatgcctctgccgacagtggtcccaaagatggacccccacccacgaggagcatcgtggaaaaagaagacgttccaaccacgtcttcaaagcaagtggattgatgtgacatctccactgacgtaagggatgacgcacaatcccactatccttcgcaagacccttcctctatataaggaagttcatttcatttggagaggacacgctcgagctcatttctctattacttcagccataacaaaagaactcttttctcttcttattaaaccatgaaaaagcctgaactcaccgcgacgtctgtcgagaagtttctgatcgaaaagttcgacagcgtctccgacctgatgcagctctcggagggcgaagaatctcgtgctttcagcttcgatgtaggagggcgtggatatgtcctgcgggtaaatagctgcgccgatggtttctacaaagatcgttatgtttatcggcactttgcatcggccgcgctcccgattccggaagtgcttgacattggggaattcagcgagagcctgacctattgcatctcccgccgtgcacagggtgtcacgttgcaagacctgcctgaaaccgaactgcccgctgttctgcagccggtcgcggaggccatggatgcgatcgctgcggccgatcttagccagacgagcgggttcggcccattcggaccgcaaggaatcggtcaatacactacatggcgtgatttcatatgcgcgattgctgatccccatgtgtatcactggcaaactgtgatggacgacaccgtcagtgcgtccgtcgcgcaggctctcgatgagctgatgctttgggccgaggactgccccgaagtccggcacctcgtgcacgcggatttcggctccaacaatgtcctgacggacaatggccgcataacagcggtcattgactggagcgaggcgatgttcggggattcccaatacgaggtcgccaacatcttcttctggaggccgtggttggcttgtatggagcagcagacgcgctacttcgagcggaggcatccggagcttgcaggatcgccgcggctccgggcgtatatgctccgcattggtcttgaccaactctatcagagcttggttgacggcaatttcgatgatgcagcttgggcgcagggtcgatgcgacgcaatcgtccgatccggagccgggactgtcgggcgtacacaaatcgcccgcagaagcgcggccgtctggaccgatggctgtgtagaagtactcgccgatagtggaaaccgacgccccagcactcgtccgagggcaaaggaatagtgaggtacctaaagaaggagtgcgtcgaagcagatcgttcaaacatttggcaataaagtttcttaagattgaatcctgttgccggtcttgcgatgattatcatataatttctgttgaattacgttaagcatgtaataattaacatgtaatgcatgacgttatttatgagatgggtttttatgattagagtcccgcaattatacatttaatacgcgatagaaaacaaaatatagcgcgcaaactaggataaattatcgcgcgcggtgtcatctatgttactagatcgatgtcgaatctgatcaacctgcattaatgaatcggccaacgcgcggggagaggcggtttgcgtattgggcgctcttccgcttcctcgctcactgactcgctgcgctcggtcgttcggctgcggcgagcggtatcagctcactcaaaggcggtaatacggttatccacagaatcaggggataacgcaggaaagaacatgtgagcaaaaggccagcaaaaggccaggaaccgtaaaaaggccgcgttgctggcgtttttccataggctccgcccccctgacgagcatcacaaaaatcgacgctcaagtcagaggtggcgaaacccgacaggactataaagataccaggcgtttccccctggaagctccctcgtgcgctctcctgttccgaccctgccgcttaccggatacctgtccgcctttctcccttcgggaagcgtggcgctttctcaatgctcacgctgtaggtatctcagttcggtgtaggtcgttcgctccaagctgggctgtgtgcacgaaccccccgttcagcccgaccgctgcgccttatccggtaactatcgtcttgagtccaacccggtaagacacgacttatcgccactggcagcagccactggtaacaggattagcagagcgaggtatgtaggcggtgctacagagttcttgaagtggtggcctaactacggctacactagaaggacagtatttggtatctgcgctctgctgaagccagttaccttcggaaaaagagttggtagctcttgatccggcaaacaaaccaccgctggtagcggtggtttttttgtttgcaagcagcagattacgcgcagaaaaaaaggatctcaagaagatcctttgatcttttctacggggtctgacgctcagtggaacgaaaactcacgttaagggattttggtcatgacattaacctataaaaataggcgtatcacgaggccctttcgtctcgcgcgtttcggtgatgacggtgaaaacctctgacacatgcagctcccggagacggtcacagcttgtctgtaagcggatgccgggagcagacaagcccgtcagggcgcgtcagcgggtgttggcgggtgtcggggctggcttaactatgcggcatcagagcagattgtactgagagtgcaccatatggacatattgtcgttagaacgcggctacaattaatacataaccttatgtatcatacacatacgatttaggtgacactatagaacggcgcgccaagcttttgatccatgcccttcatttgccgcttattaattaatttggtaacagtccgtactaatcagttacttatccttcccccatcataattaatcttggtagtctcgaatgccacaacactgactagtctcttggatcataagaaaaagccaaggaacaaaagaagacaaaacacaatgagagtatcctttgcatagcaatgtctaagttcataaaattcaaacaaaaacgcaatcacacacagtggacatcacttatccactagctgatcaggatcgccgcgtcaagaaaaaaaaactggaccccaaaagccatgcacaacaacacgtactcacaaaggtgtcaatcgagcagcccaaaacattcaccaactcaacccatcatgagccctcacatttgttgtttctaacccaacctcaaactcgtattctcttccgccacctcatttttgtttatttcaacacccgtcaaactgcatgccaccccgtggccaaatgtccatgcatgttaacaagacctatgactataaatagctgcaatctcggcccaggttttcatcatcaagaaccagttcaatatcctagtacaccgtattaaagaatttaagatatactgcggccgcatgactatcgactcacaatactacaagtcgcgagacaaaaacgacacggcacccaaaatcgcgggaatccgatatgccccgctatcgacaccattactcaaccgatgtgagaccttctctctggtctggcacattttcagcattcccactttcctcacaattttcatgctatgctgcgcaattccactgctctggccatttgtgattgcgtatgtagtgtacgctgttaaagacgactccccgtccaacggaggagtggtcaagcgatactcgcctatttcaagaaacttcttcatctggaagctctttggccgctacttccccataactctgcacaagacggtggatctggagcccacgcacacatactaccctctggacgtccaggagtatcacctgattgctgagagatactggccgcagaacaagtacctccgagcaatcatctccaccatcgagtactttctgcccgccttcatgaaacggtctctttctatcaacgagcaggagcagcctgccgagcgagatcctctcctgtctcccgtttctcccagctctccgggttctcaacctgacaagtggattaaccacgacagcagatatagccgtggagaatcatctggctccaacggccacgcctcgggctccgaacttaacggcaacggcaacaatggcaccactaaccgacgacctttgtcgtccgcctctgctggctccactgcatctgattccacgcttcttaacgggtccctcaactcctacgccaaccagatcattggcgaaaacgacccacagctgtcgcccacaaaactcaagcccactggcagaaaatacatcttcggctaccacccccacggcattatcggcatgggagcctttggtggaattgccaccgagggagctggatggtccaagctctttccgggcatccctgtttctcttatgactctcaccaacaacttccgagtgcctctctacagagagtacctcatgagtctgggagtcgcttctgtctccaagaagtcctgcaaggccctcctcaagcgaaaccagtctatctgcattgtcgttggtggagcacaggaaagtcttctggccagacccggtgtcatggacctggtgctactcaagcgaaagggttttgttcgacttggtatggaggtcggaaatgtcgcccttgttcccatcatggcctttggtgagaacgacctctatgaccaggttagcaacgacaagtcgtccaagctgtaccgattccagcagtttgtcaagaacttccttggattcacccttcctttgatgcatgcccgaggcgtcttcaactacgatgtcggtcttgtcccctacaggcgacccgtcaacattgtggttggttcccccattgacttgccttatctcccacaccccaccgacgaagaagtgtccgaataccacgaccgatacatcgccgagctgcagcgaatctacaacgagcacaaggatgaatatttcatcgattggaccgaggagggcaaaggagccccagagttccgaatgattgagtaagc

SEQ ID NO: 26 - DNA, 4171 bp, artificial sequence
  plasmid pKR264
gcccgggggatccgccctaagcttcgtacgctagcctaagtacgtactcaaaatgccaacaaataaaaaaaaagttgctttaataatgccaaaacaaattaataaaacacttacaacaccggattttttttaattaaaatgtgccatttaggataaatagttaatatttttaataattatttaaaaagccgtatctactaaaatgatttttatttggttgaaaatattaatatgtttaaatcaacacaatctatcaaaattaaactaaaaaaaaaataagtgtacgtggttaacattagtacagtaatataagaggaaaatgagaaattaagaaattgaaagcgagtctaatttttaaattatgaacctgcatatataaaaggaaagaaagaatccaggaagaaaagaaatgaaaccatgcatggtcccctcgtcatcacgagtttctgccatttgcaatagaaacactgaaacacctttctctttgtcacttaattgagatgccgaagccacctcacaccatgaacttcatgaggtgtagcacccaaggcttccatagccatgcatactgaagaatgtctcaagctcagcaccctacttctgtgacgtgtccctcattcaccttcctctcttccctataaataaccacgcctcaggttctccgcttcacaactcaaacattctctccattggtccttaaacactcatcagtcatcaccgcggccgcatttcgcaccaaatcaatgaaagtaataatgaaaagtctgaataagaatacttaggcttagatgcctttgttacttgtgtaaaataacttgagtcatgtacctttggcggaaacagaataaataaaaggtgaaattccaatgctctatgtataagttagtaatacttaatgtgttctacggttgtttcaatatcatcaaactctaattgaaactttagaaccacaaatctcaatcttttcttaatgaaatgaaaaatcttaattgtaccatgtttatgttaaacaccttacaattggttggagaggaggaccaaccgatgggacaacattgggagaaagagattcaatggagatttggataggagaacaacattctttttcacttcaatacaagatgagtgcaacactaaggatatgtatgagactttcagaagctacgacaacatagatgagtgaggtggtgattcctagcaagaaagacattagaggaagccaaaatcgaacaaggaagacatcaagggcaagagacaggaccatccatctcaggaaaaggagctttgggatagtccgagaagttgtacaagaaattttttggagggtgagtgatgcattgctggtgactttaactcaatcaaaattgagaaagaaagaaaagggagggggctcacatgtgaatagaagggaaacgggagaattttacagttttgatctaatgggcatcccagctagtggtaacatattcaccatgtttaaccttcacgtacgtctagaggatccccgggtaccgagctcgaattcactggccgtcgttttacaacgtcgtgactgggaaaaccctggcgttacccaacttaatcgccttgcagcacatccccctttcgccagctggcgtaatagcgaagaggcccgcaccgatcgcccttcccaacagttgcgcagcctgaatggcgaatggcgcctgatgcggtattttctccttacgcatctgtgcggtatttcacaccgcatatggtgcactctcagtacaatctgctctgatgccgcatagttaagccagccccgacacccgccaacacccgctgacgcgccctgacgggcttgtctgctcccggcatccgcttacagacaagctgtgaccgtctccgggagctgcatgtgtcagaggttttcaccgtcatcaccgaaacgcgcgagacgaaagggcctcgtgatacgcctatttttataggttaatgtcatgataataatggtttcttagacgtcaggtggcacttttcggggaaatgtgcgcggaacccctatttgtttatttttctaaatacattcaaatatgtatccgctcatgagacaataaccctgataaatgcttcaataatattgaaaaaggaagagtatgagtattcaacatttccgtgtcgcccttattcccttttttgcggcattttgccttcctgtttttgctcacccagaaacgctggtgaaagtaaaagatgctgaagatcagttgggtgcacgagtgggttacatcgaactggatctcaacagcggtaagatccttgagagttttcgccccgaagaacgttttccaatgatgagcacttttaaagttctgctatgtggcgcggtattatcccgtattgacgccgggcaagagcaactcggtcgccgcatacactattctcagaatgacttggttgagtactcaccagtcacagaaaagcatcttacggatggcatgacagtaagagaattatgcagtgctgccataaccatgagtgataacactgcggccaacttacttctgacaacgatcggaggaccgaaggagctaaccgcttttttgcacaacatgggggatcatgtaactcgccttgatcgttgggaaccggagctgaatgaagccataccaaacgacgagcgtgacaccacgatgcctgtagcaatggcaacaacgttgcgcaaactattaactggcgaactacttactctagcttcccggcaacaattaatagactggatggaggcggataaagttgcaggaccacttctgcgctcggcccttccggctggctggtttattgctgataaatctggagccggtgagcgtgggtctcgcggtatcattgcagcactggggccagatggtaagccctcccgtatcgtagttatctacacgacggggagtcaggcaactatggatgaacgaaatagacagatcgctgagataggtgcctcactgattaagcattggtaactgtcagaccaagtttactcatatatactttagattgatttaaaacttcatttttaatttaaaaggatctaggtgaagatcctttttgataatctcatgaccaaaatcccttaacgtgagttttcgttccactgagcgtcagaccccgtagaaaagatcaaaggatcttcttgagatcctttttttctgcgcgtaatctgctgcttgcaaacaaaaaaaccaccgctaccagcggtggtttgtttgccggatcaagagctaccaactctttttccgaaggtaactggcttcagcagagcgcagataccaaatactgtccttctagtgtagccgtagttaggccaccacttcaagaactctgtagcaccgcctacatacctcgctctgctaatcctgttaccagtggctgctgccagtggcgataagtcgtgtcttaccgggttggactcaagacgatagttaccggataaggcgcagcggtcgggctgaacggggggttcgtgcacacagcccagcttggagcgaacgacctacaccgaactgagatacctacagcgtgagctatgagaaagcgccacgcttcccgaagggagaaaggcggacaggtatccggtaagcggcagggtcggaacaggagagcgcacgagggagcttccagggggaaacgcctggtatctttatagtcctgtcgggtttcgccacctctgacttgagcgtcgatttttgtgatgctcgtcaggggggcggagcctatggaaaaacgccagcaacgcggcctttttacggttcctggccttttgctggccttttgctcacatgttctttcctgcgttatcccctgattctgtggataaccgtattaccgcctttgagtgagctgataccgctcgccgcagccgaacgaccgagcgcagcgagtcagtgagcgaggaagcggaagagcgcccaatacgcaaaccgcctctccccgcgcgttggccgattcattaatgcagctggcacgacaggtttcccgactggaaagcgggcagtgagcgcaacgcaattaatgtgagttagctcactcattaggcaccccaggctttacactttatgcttccggctcgtatgttgtgtggaattgtgagcggataacaatttcacacaggaaacagctatgaccatgattacgccaagcttgcatgcctgca

SEQ ID NO: 27 - DNA, 5724 bp, artificial sequence
  plasmid pKR 1972
ggccgcatttcgcaccaaatcaatgaaagtaataatgaaaagtctgaataagaatacttaggcttagatgcctttgttacttgtgtaaaataacttgagtcatgtacctttggcggaaacagaataaataaaaggtgaaattccaatgctctatgtataagttagtaatacttaatgtgttctacggttgtttcaatatcatcaaactctaattgaaactttagaaccacaaatctcaatcttttcttaatgaaatgaaaaatcttaattgtaccatgtttatgttaaacaccttacaattggttggagaggaggaccaaccgatgggacaacattgggagaaagagattcaatggagatttggataggagaacaacattctttttcacttcaatacaagatgagtgcaacactaaggatatgtatgagactttcagaagctacgacaacatagatgagtgaggtggtgattcctagcaagaaagacattagaggaagccaaaatcgaacaaggaagacatcaagggcaagagacaggaccatccatctcaggaaaaggagctttgggatagtccgagaagttgtacaagaaattttttggagggtgagtgatgcattgctggtgactttaactcaatcaaaattgagaaagaaagaaaagggagggggctcacatgtgaatagaagggaaacgggagaattttacagttttgatctaatgggcatcccagctagtggtaacatattcaccatgtttaaccttcacgtacgtctagaggatccccgggtaccgagctcgaattcactggccgtcgttttacaacgtcgtgactgggaaaaccctggcgttacccaacttaatcgccttgcagcacatccccctttcgccagctggcgtaatagcgaagaggcccgcaccgatcgcccttcccaacagttgcgcagcctgaatggcgaatggcgcctgatgcggtattttctccttacgcatctgtgcggtatttcacaccgcatatggtgcactctcagtacaatctgctctgatgccgcatagttaagccagccccgacacccgccaacacccgctgacgcgccctgacgggcttgtctgctcccggcatccgcttacagacaagctgtgaccgtctccgggagctgcatgtgtcagaggttttcaccgtcatcaccgaaacgcgcgagacgaaagggcctcgtgatacgcctatttttataggttaatgtcatgataataatggtttcttagacgtcaggtggcacttttcggggaaatgtgcgcggaacccctatttgtttatttttctaaatacattcaaatatgtatccgctcatgagacaataaccctgataaatgcttcaataatattgaaaaaggaagagtatgagtattcaacatttccgtgtcgcccttattcccttttttgcggcattttgccttcctgtttttgctcacccagaaacgctggtgaaagtaaaagatgctgaagatcagttgggtgcacgagtgggttacatcgaactggatctcaacagcggtaagatccttgagagttttcgccccgaagaacgttttccaatgatgagcacttttaaagttctgctatgtggcgcggtattatcccgtattgacgccgggcaagagcaactcggtcgccgcatacactattctcagaatgacttggttgagtactcaccagtcacagaaaagcatcttacggatggcatgacagtaagagaattatgcagtgctgccataaccatgagtgataacactgcggccaacttacttctgacaacgatcggaggaccgaaggagctaaccgcttttttgcacaacatgggggatcatgtaactcgccttgatcgttgggaaccggagctgaatgaagccataccaaacgacgagcgtgacaccacgatgcctgtagcaatggcaacaacgttgcgcaaactattaactggcgaactacttactctagcttcccggcaacaattaatagactggatggaggcggataaagttgcaggaccacttctgcgctcggcccttccggctggctggtttattgctgataaatctggagccggtgagcgtgggtctcgcggtatcattgcagcactggggccagatggtaagccctcccgtatcgtagttatctacacgacggggagtcaggcaactatggatgaacgaaatagacagatcgctgagataggtgcctcactgattaagcattggtaactgtcagaccaagtttactcatatatactttagattgatttaaaacttcatttttaatttaaaaggatctaggtgaagatcctttttgataatctcatgaccaaaatcccttaacgtgagttttcgttccactgagcgtcagaccccgtagaaaagatcaaaggatcttcttgagatcctttttttctgcgcgtaatctgctgcttgcaaacaaaaaaaccaccgctaccagcggtggtttgtttgccggatcaagagctaccaactctttttccgaaggtaactggcttcagcagagcgcagataccaaatactgtccttctagtgtagccgtagttaggccaccacttcaagaactctgtagcaccgcctacatacctcgctctgctaatcctgttaccagtggctgctgccagtggcgataagtcgtgtcttaccgggttggactcaagacgatagttaccggataaggcgcagcggtcgggctgaacggggggttcgtgcacacagcccagcttggagcgaacgacctacaccgaactgagatacctacagcgtgagctatgagaaagcgccacgcttcccgaagggagaaaggcggacaggtatccggtaagcggcagggtcggaacaggagagcgcacgagggagcttccagggggaaacgcctggtatctttatagtcctgtcgggtttcgccacctctgacttgagcgtcgatttttgtgatgctcgtcaggggggcggagcctatggaaaaacgccagcaacgcggcctttttacggttcctggccttttgctggccttttgctcacatgttctttcctgcgttatcccctgattctgtggataaccgtattaccgcctttgagtgagctgataccgctcgccgcagccgaacgaccgagcgcagcgagtcagtgagcgaggaagcggaagagcgcccaatacgcaaaccgcctctccccgcgcgttggccgattcattaatgcagctggcacgacaggtttcccgactggaaagcgggcagtgagcgcaacgcaattaatgtgagttagctcactcattaggcaccccaggctttacactttatgcttccggctcgtatgttgtgtggaattgtgagcggataacaatttcacacaggaaacagctatgaccatgattacgccaagcttgcatgcctgcagcccgggggatccgccctaagcttcgtacgctagcctaagtacgtactcaaaatgccaacaaataaaaaaaaagttgctttaataatgccaaaacaaattaataaaacacttacaacaccggattttttttaattaaaatgtgccatttaggataaatagttaatatttttaataattatttaaaaagccgtatctactaaaatgatttttatttggttgaaaatattaatatgtttaaatcaacacaatctatcaaaattaaactaaaaaaaaaataagtgtacgtggttaacattagtacagtaatataagaggaaaatgagaaattaagaaattgaaagcgagtctaatttttaaattatgaacctgcatatataaaaggaaagaaagaatccaggaagaaaagaaatgaaaccatgcatggtcccctcgtcatcacgagtttctgccatttgcaatagaaacactgaaacacctttctctttgtcacttaattgagatgccgaagccacctcacaccatgaacttcatgaggtgtagcacccaaggcttccatagccatgcatactgaagaatgtctcaagctcagcaccctacttctgtgacgtgtccctcattcaccttcctctcttccctataaataaccacgcctcaggttctccgcttcacaactcaaacattctctccattggtccttaaacactcatcagtcatcaccgcggccgcatgactatcgactcacaatactacaagtcgcgagacaaaaacgacacggcacccaaaatcgcgggaatccgatatgccccgctatcgacaccattactcaaccgatgtgagaccttctctctggtctggcacattttcagcattcccactttcctcacaattttcatgctatgctgcgcaattccactgctctggccatttgtgattgcgtatgtagtgtacgctgttaaagacgactccccgtccaacggaggagtggtcaagcgatactcgcctatttcaagaaacttcttcatctggaagctctttggccgctacttccccataactctgcacaagacggtggatctggagcccacgcacacatactaccctctggacgtccaggagtatcacctgattgctgagagatactggccgcagaacaagtacctccgagcaatcatcaccaccatcgagtactttctgcccgccttcatgaaacggtctctttctatcaacgagcaggagcagcctgccgagcgagatcctctcctgtctcccgtttctcccagctctccgggttctcaacctgacaagtggattaaccacgacagcagatatagccgtggagaatcatctggctccaacggccacgcctcgggctccgaacttaacggcaacggcaacaacggcaccactaaccgacgacctttgtcgtccgcctctgctggctccactgcatctgattccacgcttcttaacgggtccctcaactcctacgccaaccagatcattggcgaaaacgacccacagctgtcgcccacaaaactcaagcccactggcagaaaatacatcttcggctaccacccccacggcattatcggcatgggagcctttggtggaattgccaccgagggagctggatggtccaagctctttccgggcatccctgtttctcttatgactctcaccaacaacttccgagtgcctctctacagagagtacctcatgagtctgggagtcgcttctgtctccaagaagtcctgcaaggccctcctcaagcgaaaccagtctatctgcattgtcgttggtggagcacaggaaagtcttctggccagacccggtgtcatggacctggtgctactcaagcgaaagggttttgttcgacttggtatggaggtcggaaatgtcgcccttgttcccatcatggcctttggtgagaacgacctctatgaccaggttagcaacgacaagtcgtccaagctgtaccgattccagcagtttgtcaagaacttccttggattcacccttcctttgatgcatgcccgaggcgtcttcaactacgatgtcggtcttgtcccctacaggcgacccgtcaacattgtggttggttcccccattgacttgccttatctcccacaccccaccgacgaagaagtgtccgaataccacgaccgatacatcgccgagctgcagcgaatctacaacgagcacaaggatgaatatttcatcgattggaccgaggagggcaaaggagccccagagttccgaatgattgagtaagc

SEQ ID NO: 28 - DNA, 9139 bp, artificial sequence
  plasmid pKR2085
gtacgtctttccacaatacataactattaattaatcttaaataaataaaggataaaatatttttttttcttcataaagttaaaatatgttattttttgtttagatgtatattcgaataaatctaaatatatgataatgattttttatattgattaaacatataatcaatattaaatatgatatttttttatataggttgtacacataattttataaggataaaaaatatgataaaaataaattttaaatatttttatatttacgagaaaaaaaaatattttagccataaataaatgaccagcatattttacaaccttagtaattcataaattcctatatgtatatttgaaattaaaaacagataatcgttaagggaaggaatcctacgtcatctcttgccatttgtttttcatgcaaacagaaagggacgaaaaaccacctcaccatgaatcactcttcacaccatttttactagcaaacaagtctcaacaactgaagccagctctctttccgtttctttttacaacactttctttgaaatagtagtattttttttcacatgatttattaacgtgccaaaagatgcttattgaatagagtgcacatttgtaatgtactactaattagaacatgaaaaagcattgttctaacacgataatcctgtgaaggcgttaactccaaagatccaatttcactatataaattgtgacgaaagcaaaatgaattcacatagctgagagagaaaggaaaggttaactaagaagcaatacttcagcggccgcgcgagaaactttgtatgggcatggttatttctcacttctcaccctcctttactttcttatgctaaatcctccttcccctatatctccaccctcaacccctttttctcattataacttttggtgcctagatggtgtgtgtgtgtgcgcgcgagagatctgagctcaattttcctctctcaagtcctggtcatgctttgagggaaaagggttgaggaacttatgcatcttatatctctccacctccaggattttaagccctagttactcaacccttttccctcagaatatggcaattcaggcttttaattgctttcatttggtaccatcacttgcaagatttcagagtacaaggtgaacacacacatcttcctcttcatcaattctctagtttcatccttatcttttcattcacggtaactctcactaccctctttcatcttataagttataccgggggtgtgatgttgatgagtgtaaattaaatatatgtgatctctttctctggaaaaattttcagtgtgatatacataataatctcttaatctagagattttatggctttgttatatataagcggcgcaagggcgaattctgcagatatccatcacacttgggccgcttctagctagctagggtttgggtagtgagtgtaataaagttgcaaagtttttggttaggttacgttttgaccttattattatagttcaaagggaaacattaattaaaggggattatgaaggtggatgatgcctgattggattgaggatcttactgggtgaattgagctgcttagctatggatcccacagttctacccatcaataagtgcttttgtggtagtcttgtggcttccatatctggggagcttcatttgcctttatagtattaaccttcttccaatccagcatcatccaccacccttctcttcttttctctcataataatttaaatttgttatagactctaaactttaaatgttttttttgaagtttttccgtttttctcttttgccatgatcccgttcttgctgtggagtaaccttgtccgaggtatgtgcatgattagatccatacttaatttgtgtgcatcacgaaggtgaggttgaaatgaactttgcttttttgaccttttaggaaagttcttttgttgcagtaatcaattttaattagttttaattgacactattacttttattgtcatctttgttagttttattgttgaattgagtgcatatttcctaggaaattctcttacctaacattttttatacagatctatgctcttggctcttgcccttactcttggccttgtgttggttatttgtctacatatttattgactggtcgatgagacatgtcacaattcttgggcttatttgttggtctaataaaaggagtgcttattgaaagatcaagacggagattcggttttatataaataaactaaagatgacatattagtgtgttgatgtctcttcaggataatttttgtttgaaataatatggtaatgtcttgtctaaatttgtgtacataattcttactgatttttggattgttggatttttataaacaaatctggggccgcttctagctagctagggtttgggtagtgagtgtaataaagttgcaaagtttttggttaggttacgttttgaccttattattatagttcaaagggaaacattaattaaaggggattatgaagtgggctctcttgattcttggatgaggatcttactgggtgaattgagctgcttagctatggatcccacagttctacccatcaataagtgcttttgtggtagtcttgtggcttccatatctggggagcttcatttgcctttatagtattaaccttctccaagaacaaagagagcccacacccttctcttcttttctctcataataatttaaatttgttatagactctaaactttaaatgttttttttgaagtttttccgtttttctcttttgccatgatcccgttcttgctgtggagtaaccttgtccgaggtatgtgcatgattagatccatacttaatttgtgtgcatcacgaaggtgaggttgaaatgaactttgcttttttgaccttttaggaaagttcttttgttgcagtaatcaattttaattagttttaattgacactattacttttattgtcatctttgttagttttattgttgaattgagtgcatatttcctaggaaattctcttacctaacattttttatacagatctatgctcttggctcttgcccttactcttggccttgtgttggttatttgtctacatatttattgactggtcgatgagacatgtcacaattcttgggcttatttgttggtctaataaaaggagtgcttattgaaagatcaagacggagattcggttttatataaataaactaaagatgacatattagtgtgttgatgtctcttcaggataatttttgtttgaaataatatggtaatgtcttgtctaaatttgtgtacataattcttactgattttttggattgttggatttttataaacaaatctggggcccaagcggccgcatgagccgtaaaggttcaatacaacgagtgcttgttttcttagggacaagcattgtacttatgtatgattctgtgtaaccatgagtcttccacgttgtactaatgtgaagggcaaaaataaaacacagaacaagttcgtttttctcaaataatgtgaaggtagaaaatggaaccatgcctcctctcttgcatgtgatttaaaatattagcagatggtacgtcgagtcgacctgcaggagatccaagcttggcgcgccgttctatagtgtcacctaaatcgtatgtgtatgatacataaggttatgtattaattgtagccgcgttctaacgacaatatgtccatatggtgcactctcagtacaatctgctctgatgccgcatagttaagccagccccgacacccgccaacacccgctgacgcgccctgacgggcttgtctgctcccggcatccgcttacagacaagctgtgaccgtctccgggagctgcatgtgtcagaggttttcaccgtcatcaccgaaacgcgcgagacgaaagggcctcgtgatacgcctatttttataggttaatgtcatgaccaaaatcccttaacgtgagttttcgttccactgagcgtcagaccccgtagaaaagatcaaaggatcttcttgagatcctttttttctgcgcgtaatctgctgcttgcaaacaaaaaaaccaccgctaccagcggtggtttgtttgccggatcaagagctaccaactctttttccgaaggtaactggcttcagcagagcgcagataccaaatactgtccttctagtgtagccgtagttaggccaccacttcaagaactctgtagcaccgcctacatacctcgctctgctaatcctgttaccagtggctgctgccagtggcgataagtcgtgtcttaccgggttggactcaagacgatagttaccggataaggcgcagcggtcgggctgaacggggggttcgtgcacacagcccagcttggagcgaacgacctacaccgaactgagatacctacagcgtgagcattgagaaagcgccacgcttcccgaagggagaaaggcggacaggtatccggtaagcggcagggtcggaacaggagagcgcacgagggagcttccagggggaaacgcctggtatctttatagtcctgtcgggtttcgccacctctgacttgagcgtcgatttttgtgatgctcgtcaggggggcggagcctatggaaaaacgccagcaacgcggcctttttacggttcctggccttttgctggccttttgctcacatgttctttcctgcgttatcccctgattctgtggataaccgtattaccgcctttgagtgagctgataccgctcgccgcagccgaacgaccgagcgcagcgagtcagtgagcgaggaagcggaagagcgcccaatacgcaaaccgcctctccccgcgcgttggccgattcattaatgcaggttgatcagatctcgatcccgcgaaattaatacgactcactatagggagaccacaacggtttccctctagaaataattttgtttaactttaagaaggagatatacccatggaaaagcctgaactcaccgcgacgtctgtcgagaagtttctgatcgaaaagttcgacagcgtctccgacctgatgcagctctcggagggcgaagaatctcgtgctttcagcttcgatgtaggagggcgtggatatgtcctgcgggtaaatagctgcgccgatggtttctacaaagatcgttatgtttatcggcactttgcatcggccgcgctcccgattccggaagtgcttgacattggggaattcagcgagagcctgacctattgcatctcccgccgtgcacagggtgtcacgttgcaagacctgcctgaaaccgaactgcccgctgttctgcagccggtcgcggaggctatggatgcgatcgctgcggccgatcttagccagacgagcgggttcggcccattcggaccgcaaggaatcggtcaatacactacatggcgtgatttcatatgcgcgattgctgatccccatgtgtatcactggcaaactgtgatggacgacaccgtcagtgcgtccgtcgcgcaggctctcgatgagctgatgctttgggccgaggactgccccgaagtccggcacctcgtgcacgcggatttcggctccaacaatgtcctgacggacaatggccgcataacagcggtcattgactggagcgaggcgatgttcggggattcccaatacgaggtcgccaacatcttcttctggaggccgtggttggcttgtatggagcagcagacgcgctacttcgagcggaggcatccggagcttgcaggatcgccgcggctccgggcgtatatgctccgcattggtcttgaccaactctatcagagcttggttgacggcaatttcgatgatgcagcttgggcgcagggtcgatgcgacgcaatcgtccgatccggagccgggactgtcgggcgtacacaaatcgcccgcagaagcgcggccgtctggaccgatggctgtgtagaagtactcgccgatagtggaaaccgacgccccagcactcgtccgagggcaaaggaatagtgaggtacagcttggatcgatccggctgctaacaaagcccgaaaggaagctgagttggctgctgccaccgctgagcaataactagcataaccccttggggcctctaaacgggtcttgaggggttttttgctgaaaggaggaactatatccggatgatcgggcgcgccgtcgacggatccgtacgctagcctaagtacgtactcaaaatgccaacaaataaaaaaaaagttgctttaataatgccaaaacaaattaataaaacacttacaacaccggattttttttaattaaaatgtgccatttaggataaatagttaatatttttaataattatttaaaaagccgtatctactaaaatgatttttatttggttgaaaatattaatatgtttaaatcaacacaatctatcaaaattaaactaaaaaaaaaataagtgtacgtggttaacattagtacagtaatataagaggaaaatgagaaattaagaaattgaaagcgagtctaatttttaaattatgaacctgcatatataaaaggaaagaaagaatccaggaagaaaagaaatgaaaccatgcatggtcccctcgtcatcacgagtttctgccatttgcaatagaaacactgaaacacctttctctttgtcacttaattgagatgccgaagccacctcacaccatgaacttcatgaggtgtagcacccaaggcttccatagccatgcatactgaagaatgtctcaagctcagcaccctacttctgtgacgtgtccctcattcaccttcctctcttccctataaataaccacgcctcaggttctccgcttcacaactcaaacattctctccattggtccttaaacactcatcagtcatcaccgcggccgcatgactatcgactcacaatactacaagtcgcgagacaaaaacgacacggcacccaaaatcgcgggaatccgatatgccccgctatcgacaccattactcaaccgatgtgagaccttctctctggtctggcacattttcagcattcccactttcctcacaattttcatgctatgctgcgcaattccactgctctggccatttgtgattgcgtatgtagtgtacgctgttaaagacgactccccgtccaacggaggagtggtcaagcgatactcgcctatttcaagaaacttcttcatctggaagctctttggccgctacttccccataactctgcacaagacggtggatctggagcccacgcacacatactaccctctggacgtccaggagtatcacctgattgctgagagatactggccgcagaacaagtacctccgagcaatcatcaccaccatcgagtactttctgcccgccttcatgaaacggtctctttctatcaacgagcaggagcagcctgccgagcgagatcctctcctgtctcccgtttctcccagctctccgggttctcaacctgacaagtggattaaccacgacagcagatatagccgtggagaatcatctggctccaacggccacgcctcgggctccgaacttaacggcaacggcaacaacggcaccactaaccgacgacctttgtcgtccgcctctgctggctccactgcatctgattccacgcttcttaacgggtccctcaactcctacgccaaccagatcattggcgaaaacgacccacagctgtcgcccacaaaactcaagcccactggcagaaaatacatcttcggctaccacccccacggcattatcggcatgggagcctttggtggaattgccaccgagggagctggatggtccaagctctttccgggcatccctgtttctcttatgactctcaccaacaacttccgagtgcctctctacagagagtacctcatgagtctgggagtcgcttctgtctccaagaagtcctgcaaggccctcctcaagcgaaaccagtctatctgcattgtcgttggtggagcacaggaaagtcttctggccagacccggtgtcatggacctggtgctactcaagcgaaagggttttgttcgacttggtatggaggtcggaaatgtcgcccttgttcccatcatggcctttggtgagaacgacctctatgaccaggttagcaacgacaagtcgtccaagctgtaccgattccagcagtttgtcaagaacttccttggattcacccttcctttgatgcatgcccgaggcgtcttcaactacgatgtcggtcttgtcccctacaggcgacccgtcaacattgtggttggttcccccattgacttgccttatctcccacaccccaccgacgaagaagtgtccgaataccacgaccgatacatcgccgagctgcagcgaatctacaacgagcacaaggatgaatatttcatcgattggaccgaggagggcaaaggagccccagagttccgaatgattgagtaagcggccgcatttcgcaccaaatcaatgaaagtaataatgaaaagtctgaataagaatacttaggcttagatgcctttgttacttgtgtaaaataacttgagtcatgtacctttggcggaaacagaataaataaaaggtgaaattccaatgctctatgtataagttagtaatacttaatgtgttctacggttgtttcaatatcatcaaactctaattgaaactttagaaccacaaatctcaatcttttcttaatgaaatgaaaaatcttaattgtaccatgtttatgttaaacaccttacaattggttggagaggaggaccaaccgatgggacaacattgggagaaagagattcaatggagatttggataggagaacaacattctttttcacttcaatacaagatgagtgcaacactaaggatatgtatgagactttcagaagctacgacaacatagatgagtgaggtggtgattcctagcaagaaagacattagaggaagccaaaatcgaacaaggaagacatcaagggcaagagacaggaccatccatctcaggaaaaggagctttgggatagtccgagaagttgtacaagaaattttttggagggtgagtgatgcattgctggtgactttaactcaatcaaaattgagaaagaaagaaaagggagggggctcacatgtgaatagaagggaaacgggagaattttacagttttgatctaatgggcatcccagctagtggtaacatattcaccatgtttaaccttcac

SEQ ID NO: 29 - DNA, 6673 bp, artificial sequence
  plasmid pKR2008
atcaagcttatcgataccgtcggcgcggggtacgttagctgattaagtcagcatgcgcggccggcgtatgaactaaaatgcatgtaggtgtaagagctcatggagagcatggaatattgtatccgaccatgtaacagtataataactgagctccatctcacttcttctatgaataaacaaaggatgttatgatatattaacactctatctatgcaccttattgttctatgataaatttcctcttattattataaatcatctgaatcgtgacggcttatggaatgcttcaaatagtacaaaaacaaatgtgtactataagactttctaaacaattctaaccttagcattgtgaacgagacataagtgttaagaagacataacaattataatggaagaagtttgtctccatttatatattatatattacccacttatgtattatattaggatgttaaggagacataacaattataaagagagaagtttgtatccatttatatattatatactacccatttatatattatacttatccacttatttaatgtctttataaggtttgatccatgatatttctaatattttagttgatatgtatatgaaaaggtactatttgaactctcttactctgtataaaggttggatcatccttaaagtgggtctatttaattttattgcttcttacagataaaaaaaaaattatgagttggtttgataaaatattgaaggatttaaaataataataaataacatataatatatgtatataaatttattataatataacatttatctataaaaaagtaaatattgtcataaatctatacaatcgtttagccttgctggaacgaatctcaattatttaaacgagagtaaacatatttgactttttggttatttaacaaattattatttaacactatatgaaatttttttttttatcagcaaagaataaaattaaattaagaaggacaatggtgtcccaatccttatacaaccaacttccacaagaaagtcaagtcagagacaacaaaaaaacaagcaaaggaaattttttaatttgagttgtcttgtttgctgcataatttatgcagtaaaacactacacataacccttttagcagtagagcaatggttgaccgtgtgcttagcttcttttattttatttttttatcagcaaagaataaataaaataaaatgagacacttcagggatgtttcaacaggtacccatcacttaagtggcgcgccggaattaattaggtaatttcacgcgccggatccttaattaagtctagagtcgactgtttaattctagtggccggcccagctgatgatcccggtgaagttcctattccgaagttcctattctccagaaagtataggaacttcactagagcttgcggccgctcgagttctatagtgtcacctaaatcgtatgtgtatgatacataaggttatgtattaattgtagccgcgttctaacgacaatatgtccatatggtgcactctcagtacaatctgctctgatgccgcatagttaagccagccccgacacccgccaacacccgctgacgcgccctgacgggcttgtctgctcccggcatccgcttacagacaagctgtgaccgtctccgggagctgcatgtgtcagaggttttcaccgtcatcaccgaaacgcgcgagacgaaagggcctcgtgatacgcctatttttataggttaatgtcatgaccaaaatcccttaacgtgagttttcgttccactgagcgtcagaccccgtagaaaagatcaaaggatcttcttgagatcctttttttctgcgcgtaatctgctgcttgcaaacaaaaaaaccaccgctaccagcggtggtttgtttgccggatcaagagctaccaactctttttccgaaggtaactggcttcagcagagcgcagataccaaatactgtccttctagtgtagccgtagttaggccaccacttcaagaactctgtagcaccgcctacatacctcgctctgctaatcctgttaccagtggctgctgccagtggcgataagtcgtgtcttaccgggttggactcaagacgatagttaccggataaggcgcagcggtcgggctgaacggggggttcgtgcacacagcccagcttggagcgaacgacctacaccgaactgagatacctacagcgtgagcattgagaaagcgccacgcttcccgaagggagaaaggcggacaggtatccggtaagcggcagggtcggaacaggagagcgcacgagggagcttccagggggaaacgcctggtatctttatagtcctgtcgggtttcgccacctctgacttgagcgtcgatttttgtgatgctcgtcaggggggcggagcctatggaaaaacgccagcaacgcggcctttttacggttcctggccttttgctggccttttgctcacatgttctttcctgcgttatcccctgattctgtggataaccgtattaccgcctttgagtgagctgataccgctcgccgcagccgaacgaccgagcgcagcgagtcagtgagcgaggaagcggaagagcgcccaatacgcaaaccgcctctccccgcgcgttggccgattcattaatgcaggttgatcagatctcgatcccgcgaaattaatacgactcactatagggagaccacaacggtttccctctagaaataattttgtttaactttaagaaggagatatacccatggaaaagcctgaactcaccgcgacgtctgtcgagaagtttctgatcgaaaagttcgacagcgtctccgacctgatgcagctctcggagggcgaagaatctcgtgctttcagcttcgatgtaggagggcgtggatatgtcctgcgggtaaatagctgcgccgatggtttctacaaagatcgttatgtttatcggcactttgcatcggccgcgctcccgattccggaagtgcttgacattggggaattcagcgagagcctgacctattgcatctcccgccgtgcacagggtgtcacgttgcaagacctgcctgaaaccgaactgcccgctgttctgcagccggtcgcggaggctatggatgcgatcgctgcggccgatcttagccagacgagcgggttcggcccattcggaccgcaaggaatcggtcaatacactacatggcgtgatttcatatgcgcgattgctgatccccatgtgtatcactggcaaactgtgatggacgacaccgtcagtgcgtccgtcgcgcaggctctcgatgagctgatgctttgggccgaggactgccccgaagtccggcacctcgtgcacgcggatttcggctccaacaatgtcctgacggacaatggccgcataacagcggtcattgactggagcgaggcgatgttcggggattcccaatacgaggtcgccaacatcttcttctggaggccgtggttggcttgtatggagcagcagacgcgctacttcgagcggaggcatccggagcttgcaggatcgccgcggctccgggcgtatatgctccgcattggtcttgaccaactctatcagagcttggttgacggcaatttcgatgatgcagcttgggcgcagggtcgatgcgacgcaatcgtccgatccggagccgggactgtcgggcgtacacaaatcgcccgcagaagcgcggccgtctggaccgatggctgtgtagaagtactcgccgatagtggaaaccgacgccccagcactcgtccgagggcaaaggaatagtgaggtacagcttggatcgatccggctgctaacaaagcccgaaaggaagctgagttggctgctgccaccgctgagcaataactagcataaccccttggggcctctaaacgggtcttgaggggttttttgctgaaaggaggaactatatccggatgatcgtcgaggcctcacgtgttaacaagcttgataaactctaggcttgttgtgcagtttttgaagtataacaacagaagttcctattccgaagttcctattctctagaaagtataggaacttccaccacacaacacaatggcggccaccgcttccagaaccacccgattctcttcttcctcttcacaccccaccttccccaaacgcattactagatccaccctccctctctctcatcaaaccctcaccaaacccaaccacgctctcaaaatcaaatgttccatctccaaaccccccacggcggcgcccttcaccaaggaagcgccgaccacggagcccttcgtgtcacggttcgcctccggcgaacctcgcaagggcgcggacatccttgtggaggcgctggagaggcagggcgtgacgacggtgttcgcgtaccccggcggtgcgtcgatggagatccaccaggcgctcacgcgctccgccgccatccgcaacgtgctcccgcgccacgagcagggcggcgtcttcgccgccgaaggctacgcgcgttcctccggcctccccggcgtctgcattgccacctccggccccggcgccaccaacctcgtgagcggcctcgccgacgctttaatggacagcgtcccagtcgtcgccatcaccggccaggtcagccgccggatgatcggcaccgacgccttccaagaaaccccgatcgtggaggtgagcagatccatcacgaagcacaactacctcatcctcgacgtcgacgacatcccccgcgtcgtcgccgaggctttcttcgtcgccacctccggccgccccggtccggtcctcatcgacattcccaaagacgttcagcagcaactcgccgtgcctaattgggacgagcccgttaacctccccggttacctcgccaggctgcccaggccccccgccgaggcccaattggaacacattgtcagactcatcatggaggcccaaaagcccgttctctacgtcggcggtggcagtttgaattccagtgctgaattgaggcgctttgttgaactcactggtattcccgttgctagcactttaatgggtcttggaacttttcctattggtgatgaatattcccttcagatgctgggtatgcatggtactgtttatgctaactatgctgttgacaatagtgatttgttgcttgcctttggggtaaggtttgatgaccgtgttactgggaagcttgaggcttttgctagtagggctaagattgttcacattgatattgattctgccgagattgggaagaacaagcaggcgcacgtgtcggtttgcgcggatttgaagttggccttgaagggaattaatatgattttggaggagaaaggagtggagggtaagtttgatcttggaggttggagagaagagattaatgtgcagaaacacaagtttccattgggttacaagacattccaggacgcgatttctccgcagcatgctatcgaggttcttgatgagttgactaatggagatgctattgttagtactggggttgggcagcatcaaatgtgggctgcgcagttttacaagtacaagagaccgaggcagtggttgacctcagggggtcttggagccatgggttttggattgcctgcggctattggtgctgctgttgctaaccctggggctgttgtggttgacattgatggggatggtagtttcatcatgaatgttcaggagttggccactataagagtggagaatctcccagttaagatattgttgttgaacaatcagcatttgggtatggtggttcagtgggaggataggttctacaagtccaatagagctcacacctatcttggagatccgtctagcgagagcgagatattcccaaacatgctcaagtttgctgatgcttgtgggataccggcagcgcgagtgacgaagaaggaagagcttagagcggcaattcagagaatgttggacacccctggcccctaccttcttgatgtcattgtgccccatcaggagcatgtgttgccgatgattcccagtaatggatccttcaaggatgtgataactgagggtgatggtagaacgaggtactgattgcctagaccaaatgttccttgatgcttgttttgtacaatatatataagataatgctgtcctagttgcaggatttggcctgtggtgagcatcatagtctgtagtagttttggtagcaagacattttattttccttttatttaacttactacatgcagtagcatctatctatctctgtagtctgatatctcctgttgtctgtattgtgccgttggattttttgctgtagtgagactgaaaatgatgtgctagtaataatatttctgttagaaatctaagtagagaatctgttgaagaagtcaaaagctaatggaatcaggttacatattcaatgtttttctttttttagcggttggtagacgtgtagattcaacttctcttggagctcacctaggcaatcagtaaaatgcatattccttttttaacttgccatttatttacttttagtggaaattgtgaccaatttgttcatgtagaacggatttggaccattgcgtccacaaaacgtctcttttgctcgatcttcacaaagcgataccgaaatccagagatagttttcaaaagtcagaaatggcaaagttataaatagtaaaacagaatagatgctgtaatcgacttcaataacaagtggcatcacgtttctagttctagacccatcagctgggcc

SEQ ID NO: 30 - DNA, 13298 bp, artificial sequence
  plasmid KR2087
cgcgccggaattaattaggtaatttcacgcgccggatccttaattaagtctagagtcgactgtttaattctagtggccggcccagctgatgatcccggtgaagttcctattccgaagttcctattctccagaaagtataggaacttcactagagcttgcggccgctcgagttctatagtgtcacctaaatcgtatgtgtatgatacataaggttatgtattaattgtagccgcgttctaacgacaatatgtccatatggtgcactctcagtacaatctgctctgatgccgcatagttaagccagccccgacacccgccaacacccgctgacgcgccctgacgggcttgtctgctcccggcatccgcttacagacaagctgtgaccgtctccgggagctgcatgtgtcagaggttttcaccgtcatcaccgaaacgcgcgagacgaaagggcctcgtgatacgcctatttttataggttaatgtcatgaccaaaatcccttaacgtgagttttcgttccactgagcgtcagaccccgtagaaaagatcaaaggatcttcttgagatcctttttttctgcgcgtaatctgctgcttgcaaacaaaaaaaccaccgctaccagcggtggtttgtttgccggatcaagagctaccaactctttttccgaaggtaactggcttcagcagagcgcagataccaaatactgtccttctagtgtagccgtagttaggccaccacttcaagaactctgtagcaccgcctacatacctcgctctgctaatcctgttaccagtggctgctgccagtggcgataagtcgtgtcttaccgggttggactcaagacgatagttaccggataaggcgcagcggtcgggctgaacggggggttcgtgcacacagcccagcttggagcgaacgacctacaccgaactgagatacctacagcgtgagcattgagaaagcgccacgcttcccgaagggagaaaggcggacaggtatccggtaagcggcagggtcggaacaggagagcgcacgagggagcttccagggggaaacgcctggtatctttatagtcctgtcgggtttcgccacctctgacttgagcgtcgatttttgtgatgctcgtcaggggggcggagcctatggaaaaacgccagcaacgcggcctttttacggttcctggccttttgctggccttttgctcacatgttctttcctgcgttatcccctgattctgtggataaccgtattaccgcctttgagtgagctgataccgctcgccgcagccgaacgaccgagcgcagcgagtcagtgagcgaggaagcggaagagcgcccaatacgcaaaccgcctctccccgcgcgttggccgattcattaatgcaggttgatcagatctcgatcccgcgaaattaatacgactcactatagggagaccacaacggtttccctctagaaataattttgtttaactttaagaaggagatatacccatggaaaagcctgaactcaccgcgacgtctgtcgagaagtttctgatcgaaaagttcgacagcgtctccgacctgatgcagctctcggagggcgaagaatctcgtgctttcagcttcgatgtaggagggcgtggatatgtcctgcgggtaaatagctgcgccgatggtttctacaaagatcgttatgtttatcggcactttgcatcggccgcgctcccgattccggaagtgcttgacattggggaattcagcgagagcctgacctattgcatctcccgccgtgcacagggtgtcacgttgcaagacctgcctgaaaccgaactgcccgctgttctgcagccggtcgcggaggctatggatgcgatcgctgcggccgatcttagccagacgagcgggttcggcccattcggaccgcaaggaatcggtcaatacactacatggcgtgatttcatatgcgcgattgctgatccccatgtgtatcactggcaaactgtgatggacgacaccgtcagtgcgtccgtcgcgcaggctctcgatgagctgatgctttgggccgaggactgccccgaagtccggcacctcgtgcacgcggatttcggctccaacaatgtcctgacggacaatggccgcataacagcggtcattgactggagcgaggcgatgttcggggattcccaatacgaggtcgccaacatcttcttctggaggccgtggttggcttgtatggagcagcagacgcgctacttcgagcggaggcatccggagcttgcaggatcgccgcggctccgggcgtatatgctccgcattggtcttgaccaactctatcagagcttggttgacggcaatttcgatgatgcagcttgggcgcagggtcgatgcgacgcaatcgtccgatccggagccgggactgtcgggcgtacacaaatcgcccgcagaagcgcggccgtctggaccgatggctgtgtagaagtactcgccgatagtggaaaccgacgccccagcactcgtccgagggcaaaggaatagtgaggtacagcttggatcgatccggctgctaacaaagcccgaaaggaagctgagttggctgctgccaccgctgagcaataactagcataaccccttggggcctctaaacgggtcttgaggggttttttgctgaaaggaggaactatatccggatgatcgtcgaggcctcacgtgttaacaagcttgataaactctaggcttgttgtgcagtttttgaagtataacaacagaagttcctattccgaagttcctattctctagaaagtataggaacttccaccacacaacacaatggcggccaccgcttccagaaccacccgattctcttcttcctcttcacaccccaccttccccaaacgcattactagatccaccctccctctctctcatcaaaccctcaccaaacccaaccacgctctcaaaatcaaatgttccatctccaaaccccccacggcggcgcccttcaccaaggaagcgccgaccacggagcccttcgtgtcacggttcgcctccggcgaacctcgcaagggcgcggacatccttgtggaggcgctggagaggcagggcgtgacgacggtgttcgcgtaccccggcggtgcgtcgatggagatccaccaggcgctcacgcgctccgccgccatccgcaacgtgctcccgcgccacgagcagggcggcgtcttcgccgccgaaggctacgcgcgttcctccggcctccccggcgtctgcattgccacctccggccccggcgccaccaacctcgtgagcggcctcgccgacgctttaatggacagcgtcccagtcgtcgccatcaccggccaggtcagccgccggatgatcggcaccgacgccttccaagaaaccccgatcgtggaggtgagcagatccatcacgaagcacaactacctcatcctcgacgtcgacgacatcccccgcgtcgtcgccgaggctttcttcgtcgccacctccggccgccccggtccggtcctcatcgacattcccaaagacgttcagcagcaactcgccgtgcctaattgggacgagcccgttaacctccccggttacctcgccaggctgcccaggccccccgccgaggcccaattggaacacattgtcagactcatcatggaggcccaaaagcccgttctctacgtcggcggtggcagtttgaattccagtgctgaattgaggcgctttgttgaactcactggtattcccgttgctagcactttaatgggtcttggaacttttcctattggtgatgaatattcccttcagatgctgggtatgcatggtactgtttatgctaactatgctgttgacaatagtgatttgttgcttgcctttggggtaaggtttgatgaccgtgttactgggaagcttgaggcttttgctagtagggctaagattgttcacattgatattgattctgccgagattgggaagaacaagcaggcgcacgtgtcggtttgcgcggatttgaagttggccttgaagggaattaatatgattttggaggagaaaggagtggagggtaagtttgatcttggaggttggagagaagagattaatgtgcagaaacacaagtttccattgggttacaagacattccaggacgcgatttctccgcagcatgctatcgaggttcttgatgagttgactaatggagatgctattgttagtactggggttgggcagcatcaaatgtgggctgcgcagttttacaagtacaagagaccgaggcagtggttgacctcagggggtcttggagccatgggttttggattgcctgcggctattggtgctgctgttgctaaccctggggctgttgtggttgacattgatggggatggtagtttcatcatgaatgttcaggagttggccactataagagtggagaatctcccagttaagatattgttgttgaacaatcagcatttgggtatggtggttcagtgggaggataggttctacaagtccaatagagctcacacctatcttggagatccgtctagcgagagcgagatattcccaaacatgctcaagtttgctgatgcttgtgggataccggcagcgcgagtgacgaagaaggaagagcttagagcggcaattcagagaatgttggacacccctggcccctaccttcttgatgtcattgtgccccatcaggagcatgtgttgccgatgattcccagtaatggatccttcaaggatgtgataactgagggtgatggtagaacgaggtactgattgcctagaccaaatgttccttgatgcttgttttgtacaatatatataagataatgctgtcctagttgcaggatttggcctgtggtgagcatcatagtctgtagtagttttggtagcaagacattttattttccttttatttaacttactacatgcagtagcatctatctatctctgtagtctgatatctcctgttgtctgtattgtgccgttggattttttgctgtagtgagactgaaaatgatgtgctagtaataatatttctgttagaaatctaagtagagaatctgttgaagaagtcaaaagctaatggaatcaggttacatattcaatgtttttctttttttagcggttggtagacgtgtagattcaacttctcttggagctcacctaggcaatcagtaaaatgcatattccttttttaacttgccatttatttacttttagtggaaattgtgaccaatttgttcatgtagaacggatttggaccattgcgtccacaaaacgtctcttttgctcgatcttcacaaagcgataccgaaatccagagatagttttcaaaagtcagaaatggcaaagttataaatagtaaaacagaatagatgctgtaatcgacttcaataacaagtggcatcacgtttctagttctagacccatcagctgggccatcaagcttatcgataccgtcggcgcggggtacgttagctgattaagtcagcatgcgcggccggcgtatgaactaaaatgcatgtaggtgtaagagctcatggagagcatggaatattgtatccgaccatgtaacagtataataactgagctccatctcacttcttctatgaataaacaaaggatgttatgatatattaacactctatctatgcaccttattgttctatgataaatttcctcttattattataaatcatctgaatcgtgacggcttatggaatgcttcaaatagtacaaaaacaaatgtgtactataagactttctaaacaattctaaccttagcattgtgaacgagacataagtgttaagaagacataacaattataatggaagaagtttgtctccatttatatattatatattacccacttatgtattatattaggatgttaaggagacataacaattataaagagagaagtttgtatccatttatatattatatactacccatttatatattatacttatccacttatttaatgtctttataaggtttgatccatgatatttctaatattttagttgatatgtatatgaaaaggtactatttgaactctcttactctgtataaaggttggatcatccttaaagtgggtctatttaattttattgcttcttacagataaaaaaaaaattatgagttggtttgataaaatattgaaggatttaaaataataataaataacatataatatatgtatataaatttattataatataacatttatctataaaaaagtaaatattgtcataaatctatacaatcgtttagccttgctggaacgaatctcaattatttaaacgagagtaaacatatttgactttttggttatttaacaaattattatttaacactatatgaaatttttttttttatcagcaaagaataaaattaaattaagaaggacaatggtgtcccaatccttatacaaccaacttccacaagaaagtcaagtcagagacaacaaaaaaacaagcaaaggaaattttttaatttgagttgtcttgtttgctgcataatttatgcagtaaaacactacacataacccttttagcagtagagcaatggttgaccgtgtgcttagcttcttttattttatttttttatcagcaaagaataaataaaataaaatgagacacttcagggatgtttcaacaggtacccatcacttaagtggcgcgccgtcgacggatccgtacgctagcctaagtacgtactcaaaatgccaacaaataaaaaaaaagttgctttaataatgccaaaacaaattaataaaacacttacaacaccggattttttttaattaaaatgtgccatttaggataaatagttaatatttttaataattatttaaaaagccgtatctactaaaatgatttttatttggttgaaaatattaatatgtttaaatcaacacaatctatcaaaattaaactaaaaaaaaaataagtgtacgtggttaacattagtacagtaatataagaggaaaatgagaaattaagaaattgaaagcgagtctaatttttaaattatgaacctgcatatataaaaggaaagaaagaatccaggaagaaaagaaatgaaaccatgcatggtcccctcgtcatcacgagtttctgccatttgcaatagaaacactgaaacacctttctctttgtcacttaattgagatgccgaagccacctcacaccatgaacttcatgaggtgtagcacccaaggcttccatagccatgcatactgaagaatgtctcaagctcagcaccctacttctgtgacgtgtccctcattcaccttcctctcttccctataaataaccacgcctcaggttctccgcttcacaactcaaacattctctccattggtccttaaacactcatcagtcatcaccgcggccgcatgactatcgactcacaatactacaagtcgcgagacaaaaacgacacggcacccaaaatcgcgggaatccgatatgccccgctatcgacaccattactcaaccgatgtgagaccttctctctggtctggcacattttcagcattcccactttcctcacaattttcatgctatgctgcgcaattccactgctctggccatttgtgattgcgtatgtagtgtacgctgttaaagacgactccccgtccaacggaggagtggtcaagcgatactcgcctatttcaagaaacttcttcatctggaagctctttggccgctacttccccataactctgcacaagacggtggatctggagcccacgcacacatactaccctctggacgtccaggagtatcacctgattgctgagagatactggccgcagaacaagtacctccgagcaatcatcaccaccatcgagtactttctgcccgccttcatgaaacggtctctttctatcaacgagcaggagcagcctgccgagcgagatcctctcctgtctcccgtttctcccagctctccgggttctcaacctgacaagtggattaaccacgacagcagatatagccgtggagaatcatctggctccaacggccacgcctcgggctccgaacttaacggcaacggcaacaacggcaccactaaccgacgacctttgtcgtccgcctctgctggctccactgcatctgattccacgcttcttaacgggtccctcaactcctacgccaaccagatcattggcgaaaacgacccacagctgtcgcccacaaaactcaagcccactggcagaaaatacatcttcggctaccacccccacggcattatcggcatgggagcctttggtggaattgccaccgagggagctggatggtccaagctctttccgggcatccctgtttctcttatgactctcaccaacaacttccgagtgcctctctacagagagtacctcatgagtctgggagtcgcttctgtctccaagaagtcctgcaaggccctcctcaagcgaaaccagtctatctgcattgtcgttggtggagcacaggaaagtcttctggccagacccggtgtcatggacctggtgctactcaagcgaaagggttttgttcgacttggtatggaggtcggaaatgtcgcccttgttcccatcatggcctttggtgagaacgacctctatgaccaggttagcaacgacaagtcgtccaagctgtaccgattccagcagtttgtcaagaacttccttggattcacccttcctttgatgcatgcccgaggcgtcttcaactacgatgtcggtcttgtcccctacaggcgacccgtcaacattgtggttggttcccccattgacttgccttatctcccacaccccaccgacgaagaagtgtccgaataccacgaccgatacatcgccgagctgcagcgaatctacaacgagcacaaggatgaatatttcatcgattggaccgaggagggcaaaggagccccagagttccgaatgattgagtaagcggccgcatttcgcaccaaatcaatgaaagtaataatgaaaagtctgaataagaatacttaggcttagatgcctttgttacttgtgtaaaataacttgagtcatgtacctttggcggaaacagaataaataaaaggtgaaattccaatgctctatgtataagttagtaatacttaatgtgttctacggttgtttcaatatcatcaaactctaattgaaactttagaaccacaaatctcaatcttttcttaatgaaatgaaaaatcttaattgtaccatgtttatgttaaacaccttacaattggttggagaggaggaccaaccgatgggacaacattgggagaaagagattcaatggagatttggataggagaacaacattctttttcacttcaatacaagatgagtgcaacactaaggatatgtatgagactttcagaagctacgacaacatagatgagtgaggtggtgattcctagcaagaaagacattagaggaagccaaaatcgaacaaggaagacatcaagggcaagagacaggaccatccatctcaggaaaaggagctttgggatagtccgagaagttgtacaagaaattttttggagggtgagtgatgcattgctggtgactttaactcaatcaaaattgagaaagaaagaaaagggagggggctcacatgtgaatagaagggaaacgggagaattttacagttttgatctaatgggcatcccagctagtggtaacatattcaccatgtttaaccttcacgtacgtctttccacaatacataactattaattaatcttaaataaataaaggataaaatatttttttttcttcataaagttaaaatatgttattttttgtttagatgtatattcgaataaatctaaatatatgataatgattttttatattgattaaacatataatcaatattaaatatgatatttttttatataggttgtacacataattttataaggataaaaaatatgataaaaataaattttaaatatttttatatttacgagaaaaaaaaatattttagccataaataaatgaccagcatattttacaaccttagtaattcataaattcctatatgtatatttgaaattaaaaacagataatcgttaagggaaggaatcctacgtcatctcttgccatttgtttttcatgcaaacagaaagggacgaaaaaccacctcaccatgaatcactcttcacaccatttttactagcaaacaagtctcaacaactgaagccagctctctttccgtttctttttacaacactttctttgaaatagtagtattttttttcacatgatttattaacgtgccaaaagatgcttattgaatagagtgcacatttgtaatgtactactaattagaacatgaaaaagcattgttctaacacgataatcctgtgaaggcgttaactccaaagatccaatttcactatataaattgtgacgaaagcaaaatgaattcacatagctgagagagaaaggaaaggttaactaagaagcaatacttcagcggccgcgcgagaaactttgtatgggcatggttatttctcacttctcaccctcctttactttcttatgctaaatcctccttcccctatatctccaccctcaacccctttttctcattataacttttggtgcctagatggtgtgtgtgtgtgcgcgcgagagatctgagctcaattttcctctctcaagtcctggtcatgctttgagggaaaagggttgaggaacttatgcatcttatatctctccacctccaggattttaagccctagttactcaacccttttccctcagaatatggcaattcaggcttttaattgctttcatttggtaccatcacttgcaagatttcagagtacaaggtgaacacacacatcttcctcttcatcaattctctagtttcatccttatcttttcattcacggtaactctcactaccctctttcatcttataagttataccgggggtgtgatgttgatgagtgtaaattaaatatatgtgatctctttctctggaaaaattttcagtgtgatatacataataatctcttaatctagagattttatggctttgttatatataagcggcgcaagggcgaattctgcagatatccatcacacttgggccgcttctagctagctagggtttgggtagtgagtgtaataaagttgcaaagtttttggttaggttacgttttgaccttattattatagttcaaagggaaacattaattaaaggggattatgaaggtggatgatgcctgattggattgaggatcttactgggtgaattgagctgcttagctatggatcccacagttctacccatcaataagtgcttttgtggtagtcttgtggcttccatatctggggagcttcatttgcctttatagtattaaccttcttccaatccagcatcatccaccacccttctcttcttttctctcataataatttaaatttgttatagactctaaactttaaatgttttttttgaagtttttccgtttttctcttttgccatgatcccgttcttgctgtggagtaaccttgtccgaggtatgtgcatgattagatccatacttaatttgtgtgcatcacgaaggtgaggttgaaatgaactttgcttttttgaccttttaggaaagttcttttgttgcagtaatcaattttaattagttttaattgacactattacttttattgtcatctttgttagttttattgttgaattgagtgcatatttcctaggaaattctcttacctaacattttttatacagatctatgctcttggctcttgcccttactcttggccttgtgttggttatttgtctacatatttattgactggtcgatgagacatgtcacaattcttgggcttatttgttggtctaataaaaggagtgcttattgaaagatcaagacggagattcggttttatataaataaactaaagatgacatattagtgtgttgatgtctcttcaggataatttttgtttgaaataatatggtaatgtcttgtctaaatttgtgtacataattcttactgatttttggattgttggatttttataaacaaatctggggccgcttctagctagctagggtttgggtagtgagtgtaataaagttgcaaagtttttggttaggttacgttttgaccttattattatagttcaaagggaaacattaattaaaggggattatgaagtgggctctcttgattcttggatgaggatcttactgggtgaattgagctgcttagctatggatcccacagttctacccatcaataagtgcttttgtggtagtcttgtggcttccatatctggggagcttcatttgcctttatagtattaaccttctccaagaacaaagagagcccacacccttctcttcttttctctcataataatttaaatttgttatagactctaaactttaaatgttttttttgaagtttttccgtttttctcttttgccatgatcccgttcttgctgtggagtaaccttgtccgaggtatgtgcatgattagatccatacttaatttgtgtgcatcacgaaggtgaggttgaaatgaactttgcttttttgaccttttaggaaagttcttttgttgcagtaatcaattttaattagttttaattgacactattacttttattgtcatctttgttagttttattgttgaattgagtgcatatttcctaggaaattctcttacctaacattttttatacagatctatgctcttggctcttgcccttactcttggccttgtgttggttatttgtctacatatttattgactggtcgatgagacatgtcacaattcttgggcttatttgttggtctaataaaaggagtgcttattgaaagatcaagacggagattcggttttatataaataaactaaagatgacatattagtgtgttgatgtctcttcaggataatttttgtttgaaataatatggtaatgtcttgtctaaatttgtgtacataattcttactgattttttggattgttggatttttataaacaaatctggggcccaagcggccgcatgagccgtaaaggttcaatacaacgagtgcttgttttcttagggacaagcattgtacttatgtatgattctgtgtaaccatgagtcttccacgttgtactaatgtgaagggcaaaaataaaacacagaacaagttcgtttttctcaaataatgtgaaggtagaaaatggaaccatgcctcctctcttgcatgtgatttaaaatattagcagatggtacgtcgagtcgacctgcaggagatccaagcttgg

SEQ ID NO: 31 - DNA, 19287 bp, artificial sequence
  plasmid pKR2101 (PHP52246)
  misc_feature (14490)..(14490): n is a, c, g, or t
ggagatccaagcttggcgcgccggaattaattaggtaatttcacgcgccggatccttaattaagtctagagtcgactgtttaattctagtggccggcccagctgatgatcccggtgaagttcctattccgaagttcctattctccagaaagtataggaacttcactagagcttgcggccgctcgagttctatagtgtcacctaaatcgtatgtgtatgatacataaggttatgtattaattgtagccgcgttctaacgacaatatgtccatatggtgcactctcagtacaatctgctctgatgccgcatagttaagccagccccgacacccgccaacacccgctgacgcgccctgacgggcttgtctgctcccggcatccgcttacagacaagctgtgaccgtctccgggagctgcatgtgtcagaggttttcaccgtcatcaccgaaacgcgcgagacgaaagggcctcgtgatacgcctatttttataggttaatgtcatgaccaaaatcccttaacgtgagttttcgttccactgagcgtcagaccccgtagaaaagatcaaaggatcttcttgagatcctttttttctgcgcgtaatctgctgcttgcaaacaaaaaaaccaccgctaccagcggtggtttgtttgccggatcaagagctaccaactctttttccgaaggtaactggcttcagcagagcgcagataccaaatactgtccttctagtgtagccgtagttaggccaccacttcaagaactctgtagcaccgcctacatacctcgctctgctaatcctgttaccagtggctgctgccagtggcgataagtcgtgtcttaccgggttggactcaagacgatagttaccggataaggcgcagcggtcgggctgaacggggggttcgtgcacacagcccagcttggagcgaacgacctacaccgaactgagatacctacagcgtgagcattgagaaagcgccacgcttcccgaagggagaaaggcggacaggtatccggtaagcggcagggtcggaacaggagagcgcacgagggagcttccagggggaaacgcctggtatctttatagtcctgtcgggtttcgccacctctgacttgagcgtcgatttttgtgatgctcgtcaggggggcggagcctatggaaaaacgccagcaacgcggcctttttacggttcctggccttttgctggccttttgctcacatgttctttcctgcgttatcccctgattctgtggataaccgtattaccgcctttgagtgagctgataccgctcgccgcagccgaacgaccgagcgcagcgagtcagtgagcgaggaagcggaagagcgcccaatacgcaaaccgcctctccccgcgcgttggccgattcattaatgcaggttgatcagatctcgatcccgcgaaattaatacgactcactatagggagaccacaacggtttccctctagaaataattttgtttaactttaagaaggagatatacccatggaaaagcctgaactcaccgcgacgtctgtcgagaagtttctgatcgaaaagttcgacagcgtctccgacctgatgcagctctcggagggcgaagaatctcgtgctttcagcttcgatgtaggagggcgtggatatgtcctgcgggtaaatagctgcgccgatggtttctacaaagatcgttatgtttatcggcactttgcatcggccgcgctcccgattccggaagtgcttgacattggggaattcagcgagagcctgacctattgcatctcccgccgtgcacagggtgtcacgttgcaagacctgcctgaaaccgaactgcccgctgttctgcagccggtcgcggaggctatggatgcgatcgctgcggccgatcttagccagacgagcgggttcggcccattcggaccgcaaggaatcggtcaatacactacatggcgtgatttcatatgcgcgattgctgatccccatgtgtatcactggcaaactgtgatggacgacaccgtcagtgcgtccgtcgcgcaggctctcgatgagctgatgctttgggccgaggactgccccgaagtccggcacctcgtgcacgcggatttcggctccaacaatgtcctgacggacaatggccgcataacagcggtcattgactggagcgaggcgatgttcggggattcccaatacgaggtcgccaacatcttcttctggaggccgtggttggcttgtatggagcagcagacgcgctacttcgagcggaggcatccggagcttgcaggatcgccgcggctccgggcgtatatgctccgcattggtcttgaccaactctatcagagcttggttgacggcaatttcgatgatgcagcttgggcgcagggtcgatgcgacgcaatcgtccgatccggagccgggactgtcgggcgtacacaaatcgcccgcagaagcgcggccgtctggaccgatggctgtgtagaagtactcgccgatagtggaaaccgacgccccagcactcgtccgagggcaaaggaatagtgaggtacagcttggatcgatccggctgctaacaaagcccgaaaggaagctgagttggctgctgccaccgctgagcaataactagcataaccccttggggcctctaaacgggtcttgaggggttttttgctgaaaggaggaactatatccggatgatcgtcgaggcctcacgtgttaacaagcttgataaactctaggcttgttgtgcagtttttgaagtataacaacagaagttcctattccgaagttcctattctctagaaagtataggaacttccaccacacaacacaatggcggccaccgcttccagaaccacccgattctcttcttcctcttcacaccccaccttccccaaacgcattactagatccaccctccctctctctcatcaaaccctcaccaaacccaaccacgctctcaaaatcaaatgttccatctccaaaccccccacggcggcgcccttcaccaaggaagcgccgaccacggagcccttcgtgtcacggttcgcctccggcgaacctcgcaagggcgcggacatccttgtggaggcgctggagaggcagggcgtgacgacggtgttcgcgtaccccggcggtgcgtcgatggagatccaccaggcgctcacgcgctccgccgccatccgcaacgtgctcccgcgccacgagcagggcggcgtcttcgccgccgaaggctacgcgcgttcctccggcctccccggcgtctgcattgccacctccggccccggcgccaccaacctcgtgagcggcctcgccgacgctttaatggacagcgtcccagtcgtcgccatcaccggccaggtcagccgccggatgatcggcaccgacgccttccaagaaaccccgatcgtggaggtgagcagatccatcacgaagcacaactacctcatcctcgacgtcgacgacatcccccgcgtcgtcgccgaggctttcttcgtcgccacctccggccgccccggtccggtcctcatcgacattcccaaagacgttcagcagcaactcgccgtgcctaattgggacgagcccgttaacctccccggttacctcgccaggctgcccaggccccccgccgaggcccaattggaacacattgtcagactcatcatggaggcccaaaagcccgttctctacgtcggcggtggcagtttgaattccagtgctgaattgaggcgctttgttgaactcactggtattcccgttgctagcactttaatgggtcttggaacttttcctattggtgatgaatattcccttcagatgctgggtatgcatggtactgtttatgctaactatgctgttgacaatagtgatttgttgcttgcctttggggtaaggtttgatgaccgtgttactgggaagcttgaggcttttgctagtagggctaagattgttcacattgatattgattctgccgagattgggaagaacaagcaggcgcacgtgtcggtttgcgcggatttgaagttggccttgaagggaattaatatgattttggaggagaaaggagtggagggtaagtttgatcttggaggttggagagaagagattaatgtgcagaaacacaagtttccattgggttacaagacattccaggacgcgatttctccgcagcatgctatcgaggttcttgatgagttgactaatggagatgctattgttagtactggggttgggcagcatcaaatgtgggctgcgcagttttacaagtacaagagaccgaggcagtggttgacctcagggggtcttggagccatgggttttggattgcctgcggctattggtgctgctgttgctaaccctggggctgttgtggttgacattgatggggatggtagtttcatcatgaatgttcaggagttggccactataagagtggagaatctcccagttaagatattgttgttgaacaatcagcatttgggtatggtggttcagtgggaggataggttctacaagtccaatagagctcacacctatcttggagatccgtctagcgagagcgagatattcccaaacatgctcaagtttgctgatgcttgtgggataccggcagcgcgagtgacgaagaaggaagagcttagagcggcaattcagagaatgttggacacccctggcccctaccttcttgatgtcattgtgccccatcaggagcatgtgttgccgatgattcccagtaatggatccttcaaggatgtgataactgagggtgatggtagaacgaggtactgattgcctagaccaaatgttccttgatgcttgttttgtacaatatatataagataatgctgtcctagttgcaggatttggcctgtggtgagcatcatagtctgtagtagttttggtagcaagacattttattttccttttatttaacttactacatgcagtagcatctatctatctctgtagtctgatatctcctgttgtctgtattgtgccgttggattttttgctgtagtgagactgaaaatgatgtgctagtaataatatttctgttagaaatctaagtagagaatctgttgaagaagtcaaaagctaatggaatcaggttacatattcaatgtttttctttttttagcggttggtagacgtgtagattcaacttctcttggagctcacctaggcaatcagtaaaatgcatattccttttttaacttgccatttatttacttttagtggaaattgtgaccaatttgttcatgtagaacggatttggaccattgcgtccacaaaacgtctcttttgctcgatcttcacaaagcgataccgaaatccagagatagttttcaaaagtcagaaatggcaaagttataaatagtaaaacagaatagatgctgtaatcgacttcaataacaagtggcatcacgtttctagttctagacccatcagctgggccatcaagcttatcgataccgtcggcgcggggtacgttagctgattaagtcagcatgcgcggccggcgtatgaactaaaatgcatgtaggtgtaagagctcatggagagcatggaatattgtatccgaccatgtaacagtataataactgagctccatctcacttcttctatgaataaacaaaggatgttatgatatattaacactctatctatgcaccttattgttctatgataaatttcctcttattattataaatcatctgaatcgtgacggcttatggaatgcttcaaatagtacaaaaacaaatgtgtactataagactttctaaacaattctaaccttagcattgtgaacgagacataagtgttaagaagacataacaattataatggaagaagtttgtctccatttatatattatatattacccacttatgtattatattaggatgttaaggagacataacaattataaagagagaagtttgtatccatttatatattatatactacccatttatatattatacttatccacttatttaatgtctttataaggtttgatccatgatatttctaatattttagttgatatgtatatgaaaaggtactatttgaactctcttactctgtataaaggttggatcatccttaaagtgggtctatttaattttattgcttcttacagataaaaaaaaaattatgagttggtttgataaaatattgaaggatttaaaataataataaataacatataatatatgtatataaatttattataatataacatttatctataaaaaagtaaatattgtcataaatctatacaatcgtttagccttgctggaacgaatctcaattatttaaacgagagtaaacatatttgactttttggttatttaacaaattattatttaacactatatgaaatttttttttttatcagcaaagaataaaattaaattaagaaggacaatggtgtcccaatccttatacaaccaacttccacaagaaagtcaagtcagagacaacaaaaaaacaagcaaaggaaattttttaatttgagttgtcttgtttgctgcataatttatgcagtaaaacactacacataacccttttagcagtagagcaatggttgaccgtgtgcttagcttcttttattttatttttttatcagcaaagaataaataaaataaaatgagacacttcagggatgtttcaacaggtacccatcacttaagtggcgcgccgtcgacggatccgtacgctagcctaagtacgtactcaaaatgccaacaaataaaaaaaaagttgctttaataatgccaaaacaaattaataaaacacttacaacaccggattttttttaattaaaatgtgccatttaggataaatagttaatatttttaataattatttaaaaagccgtatctactaaaatgatttttatttggttgaaaatattaatatgtttaaatcaacacaatctatcaaaattaaactaaaaaaaaaataagtgtacgtggttaacattagtacagtaatataagaggaaaatgagaaattaagaaattgaaagcgagtctaatttttaaattatgaacctgcatatataaaaggaaagaaagaatccaggaagaaaagaaatgaaaccatgcatggtcccctcgtcatcacgagtttctgccatttgcaatagaaacactgaaacacctttctctttgtcacttaattgagatgccgaagccacctcacaccatgaacttcatgaggtgtagcacccaaggcttccatagccatgcatactgaagaatgtctcaagctcagcaccctacttctgtgacgtgtccctcattcaccttcctctcttccctataaataaccacgcctcaggttctccgcttcacaactcaaacattctctccattggtccttaaacactcatcagtcatcaccgcggccgcatgactatcgactcacaatactacaagtcgcgagacaaaaacgacacggcacccaaaatcgcgggaatccgatatgccccgctatcgacaccattactcaaccgatgtgagaccttctctctggtctggcacattttcagcattcccactttcctcacaattttcatgctatgctgcgcaattccactgctctggccatttgtgattgcgtatgtagtgtacgctgttaaagacgactccccgtccaacggaggagtggtcaagcgatactcgcctatttcaagaaacttcttcatctggaagctctttggccgctacttccccataactctgcacaagacggtggatctggagcccacgcacacatactaccctctggacgtccaggagtatcacctgattgctgagagatactggccgcagaacaagtacctccgagcaatcatcaccaccatcgagtactttctgcccgccttcatgaaacggtctctttctatcaacgagcaggagcagcctgccgagcgagatcctctcctgtctcccgtttctcccagctctccgggttctcaacctgacaagtggattaaccacgacagcagatatagccgtggagaatcatctggctccaacggccacgcctcgggctccgaacttaacggcaacggcaacaacggcaccactaaccgacgacctttgtcgtccgcctctgctggctccactgcatctgattccacgcttcttaacgggtccctcaactcctacgccaaccagatcattggcgaaaacgacccacagctgtcgcccacaaaactcaagcccactggcagaaaatacatcttcggctaccacccccacggcattatcggcatgggagcctttggtggaattgccaccgagggagctggatggtccaagctctttccgggcatccctgtttctcttatgactctcaccaacaacttccgagtgcctctctacagagagtacctcatgagtctgggagtcgcttctgtctccaagaagtcctgcaaggccctcctcaagcgaaaccagtctatctgcattgtcgttggtggagcacaggaaagtcttctggccagacccggtgtcatggacctggtgctactcaagcgaaagggttttgttcgacttggtatggaggtcggaaatgtcgcccttgttcccatcatggcctttggtgagaacgacctctatgaccaggttagcaacgacaagtcgtccaagctgtaccgattccagcagtttgtcaagaacttccttggattcacccttcctttgatgcatgcccgaggcgtcttcaactacgatgtcggtcttgtcccctacaggcgacccgtcaacattgtggttggttcccccattgacttgccttatctcccacaccccaccgacgaagaagtgtccgaataccacgaccgatacatcgccgagctgcagcgaatctacaacgagcacaaggatgaatatttcatcgattggaccgaggagggcaaaggagccccagagttccgaatgattgagtaagcggccgcatttcgcaccaaatcaatgaaagtaataatgaaaagtctgaataagaatacttaggcttagatgcctttgttacttgtgtaaaataacttgagtcatgtacctttggcggaaacagaataaataaaaggtgaaattccaatgctctatgtataagttagtaatacttaatgtgttctacggttgtttcaatatcatcaaactctaattgaaactttagaaccacaaatctcaatcttttcttaatgaaatgaaaaatcttaattgtaccatgtttatgttaaacaccttacaattggttggagaggaggaccaaccgatgggacaacattgggagaaagagattcaatggagatttggataggagaacaacattctttttcacttcaatacaagatgagtgcaacactaaggatatgtatgagactttcagaagctacgacaacatagatgagtgaggtggtgattcctagcaagaaagacattagaggaagccaaaatcgaacaaggaagacatcaagggcaagagacaggaccatccatctcaggaaaaggagctttgggatagtccgagaagttgtacaagaaattttttggagggtgagtgatgcattgctggtgactttaactcaatcaaaattgagaaagaaagaaaagggagggggctcacatgtgaatagaagggaaacgggagaattttacagttttgatctaatgggcatcccagctagtggtaacatattcaccatgtttaaccttcacgtacgtctttccacaatacataactattaattaatcttaaataaataaaggataaaatatttttttttcttcataaagttaaaatatgttattttttgtttagatgtatattcgaataaatctaaatatatgataatgattttttatattgattaaacatataatcaatattaaatatgatatttttttatataggttgtacacataattttataaggataaaaaatatgataaaaataaattttaaatatttttatatttacgagaaaaaaaaatattttagccataaataaatgaccagcatattttacaaccttagtaattcataaattcctatatgtatatttgaaattaaaaacagataatcgttaagggaaggaatcctacgtcatctcttgccatttgtttttcatgcaaacagaaagggacgaaaaaccacctcaccatgaatcactcttcacaccatttttactagcaaacaagtctcaacaactgaagccagctctctttccgtttctttttacaacactttctttgaaatagtagtattttttttcacatgatttattaacgtgccaaaagatgcttattgaatagagtgcacatttgtaatgtactactaattagaacatgaaaaagcattgttctaacacgataatcctgtgaaggcgttaactccaaagatccaatttcactatataaattgtgacgaaagcaaaatgaattcacatagctgagagagaaaggaaaggttaactaagaagcaatacttcagcggccgcgcgagaaactttgtatgggcatggttatttctcacttctcaccctcctttactttcttatgctaaatcctccttcccctatatctccaccctcaacccctttttctcattataacttttggtgcctagatggtgtgtgtgtgtgcgcgcgagagatctgagctcaattttcctctctcaagtcctggtcatgctttgagggaaaagggttgaggaacttatgcatcttatatctctccacctccaggattttaagccctagttactcaacccttttccctcagaatatggcaattcaggcttttaattgctttcatttggtaccatcacttgcaagatttcagagtacaaggtgaacacacacatcttcctcttcatcaattctctagtttcatccttatcttttcattcacggtaactctcactaccctctttcatcttataagttataccgggggtgtgatgttgatgagtgtaaattaaatatatgtgatctctttctctggaaaaattttcagtgtgatatacataataatctcttaatctagagattttatggctttgttatatataagcggcgcaagggcgaattctgcagatatccatcacacttgggccgcttctagctagctagggtttgggtagtgagtgtaataaagttgcaaagtttttggttaggttacgttttgaccttattattatagttcaaagggaaacattaattaaaggggattatgaaggtggatgatgcctgattggattgaggatcttactgggtgaattgagctgcttagctatggatcccacagttctacccatcaataagtgcttttgtggtagtcttgtggcttccatatctggggagcttcatttgcctttatagtattaaccttcttccaatccagcatcatccaccacccttctcttcttttctctcataataatttaaatttgttatagactctaaactttaaatgttttttttgaagtttttccgtttttctcttttgccatgatcccgttcttgctgtggagtaaccttgtccgaggtatgtgcatgattagatccatacttaatttgtgtgcatcacgaaggtgaggttgaaatgaactttgcttttttgaccttttaggaaagttcttttgttgcagtaatcaattttaattagttttaattgacactattacttttattgtcatctttgttagttttattgttgaattgagtgcatatttcctaggaaattctcttacctaacattttttatacagatctatgctcttggctcttgcccttactcttggccttgtgttggttatttgtctacatatttattgactggtcgatgagacatgtcacaattcttgggcttatttgttggtctaataaaaggagtgcttattgaaagatcaagacggagattcggttttatataaataaactaaagatgacatattagtgtgttgatgtctcttcaggataatttttgtttgaaataatatggtaatgtcttgtctaaatttgtgtacataattcttactgatttttggattgttggatttttataaacaaatctggggccgcttctagctagctagggtttgggtagtgagtgtaataaagttgcaaagtttttggttaggttacgttttgaccttattattatagttcaaagggaaacattaattaaaggggattatgaagtgggctctcttgattcttggatgaggatcttactgggtgaattgagctgcttagctatggatcccacagttctacccatcaataagtgcttttgtggtagtcttgtggcttccatatctggggagcttcatttgcctttatagtattaaccttctccaagaacaaagagagcccacacccttctcttcttttctctcataataatttaaatttgttatagactctaaactttaaatgttttttttgaagtttttccgtttttctcttttgccatgatcccgttcttgctgtggagtaaccttgtccgaggtatgtgcatgattagatccatacttaatttgtgtgcatcacgaaggtgaggttgaaatgaactttgcttttttgaccttttaggaaagttcttttgttgcagtaatcaattttaattagttttaattgacactattacttttattgtcatctttgttagttttattgttgaattgagtgcatatttcctaggaaattctcttacctaacattttttatacagatctatgctcttggctcttgcccttactcttggccttgtgttggttatttgtctacatatttattgactggtcgatgagacatgtcacaattcttgggcttatttgttggtctaataaaaggagtgcttattgaaagatcaagacggagattcggttttatataaataaactaaagatgacatattagtgtgttgatgtctcttcaggataatttttgtttgaaataatatggtaatgtcttgtctaaatttgtgtacataattcttactgattttttggattgttggatttttataaacaaatctggggcccaagcggccgcatgagccgtaaaggttcaatacaacgagtgcttgttttcttagggacaagcattgtacttatgtatgattctgtgtaaccatgagtcttccacgttgtactaatgtgaagggcaaaaataaaacacagaacaagttcgtttttctcaaataatgtgaaggtagaaaatggaaccatgcctcctctcttgcatgtgatttaaaatattagcagatggtacgtcgagtcgacctgcaggtcgactcgacgtacgtcctcgaagagaagggttaataacacattttttaacatttttaacacaaattttagttatttaaaaatttattaaaaaatttaaaataagaagaggaactctttaaataaatctaacttacaaaatttatgatttttaataagttttcaccaataaaaaatgtcataaaaatatgttaaaaagtatattatcaatattctctttatgataaataaaaagaaaaaaaaaataaaagttaagtgaaaatgagattgaagtgactttaggtgtgtataaatatatcaaccccgccaacaatttatttaatccaaatatattgaagtatattattccatagcctttatttatttatatatttattatataaaagctttatttgttctaggttgttcatgaaatatttttttggttttatctccgttgtaagaaaatcatgtgctttgtgtcgccactcactattgcagctttttcatgcattggtcagattgacggttgattgtatttttgttttttatggttttgtgttatgacttaagtcttcatctctttatctcttcatcaggtttgatggttacctaatatggtccatgggtacatgcatggttaaattaggtggccaactttgttgtgaacgatagaattttttttatattaagtaaactatttttatattatgaaataataataaaaaaaatattttatcattattaacaaaatcatattagttaatttgttaactctataataaaagaaatactgtaacattcacattacatggtaacatctttccaccctttcatttgttttttgtttgatgactttttttcttgtttaaatttatttcccttcttttaaatttggaatacattatcatcatatataaactaaaatactaaaaacaggattacacaaatgataaataataacacaaatatttataaatctagctgcaatatatttaaactagctatatcgatattgtaaaataaaactagctgcattgatactgataaaaaaatatcatgtgctttctggactgatgatgcagtatacttttgacattgcctttattttatttttcagaaaagctttcttagttctgggttcttcattatttgtttcccatctccattgtgaattgaatcatttgcttcgtgtcacaaatacaatttagntaggtacatgcattggtcagattcacggtttattatgtcatgacttaagttcatggtagtacattacctgccacgcatgcattatattggttagatttgataggcaaatttggttgtcaacaatataaatataaataatgtttttatattacgaaataacagtgatcaaaacaaacagttttatctttattaacaagattttgtttttgtttgatgacgttttttaatgtttacgctttcccccttcttttgaatttagaacactttatcatcataaaatcaaatactaaaaaaattacatatttcataaataataacacaaatatttttaaaaaatctgaaataataatgaacaatattacatattatcacgaaaattcattaataaaaatattatataaataaaatgtaatagtagttatatgtaggaaaaaagtactgcacgcataatatatacaaaaagattaaaatgaactattataaataataacactaaattaatggtgaatcatatcaaaataatgaaaaagtaaataaaatttgtaattaacttctatatgtattacacacacaaataataaataatagtaaaaaaaattatgataaatatttaccatctcataagatatttaaaataatgataaaaatatagattattttttatgcaactagctagccaaaaagagaacacgggtatatataaaaagagtacctttaaattctactgtacttcctttattcctgacgtttttatatcaagtggacatacgtgaagattttaattatcagtctaaatatttcattagcacttaatacttttctgttttattcctatcctataagtagtcccgattctcccaacattgcttattcacacaactaactaagaaagtcttccatagccccccaagcggccgctagtcgactaagtcatcaactattccaagctacgtatttgggagtttgtggagtacagcaagatgatatacctagacggtgatatccaagtttttgacaacattgaccacttgtttgacttgcctgataactacttctatgcggtgatggactgtttctgtgagccaacttggggccacactaaacaatatcagatcggttactgccagcagtgcccccataaggttcagtggcccactcactttgggcccaaacctcctctctatttcaatgctggcatgtttgtgtatgagcccaatttggctacttaccgtgacctccttcaaacagtccaagtcacccagcccacttcctttgctgaacaggattttttgaacatgtacttcaaggacaaatataggccaattcctaatgtctacaatcttgtgctggccatgctgtggcgtcaccctgagaacgttgagcttgacaaagttaaagtggttcactactgtgctgctgggtctaagccttggaggtacactgggaagtgactcgaggtcatcaattactccaagctacgtatttgggagttcgtggagtacaagaagacgatatacctagacggtgacatccaagtatttggaaacatagaccacttgtttgatctgcctgataattatttctatgcggtgatggattgtttctgcgagaagacttggagccacacccctcagttccagattgggtactgccaacagtgccctgataaggttcaatggccctctcactttggttccaaacctcctctatatttcaatgctggcatgtttgtttatgagcctaatctcgacacctaccgtgatcttctccaaactgtccaactcaccaagcccacttcttttgctgagcaggactttctcaacatgtacttcaaggacaagtacaagccaataccgaacatgtacaaccttgtgctggccatgttgtggcgtcaccctgaaaatgttgaacttgataaagttcaagtggttcattactgtgctgctgggtctaagccttggaggttcactgggaagtaactgcaggtcatcaactactccaagctccgtatatgggagtttgtggagtacagcaagatgatatacttggacggagacattgaggtatatgagaacatagaccacctatttgacctacctgatggtaacttttacgctgtgatggattgtttctgcgagaagacatggagtcacacccctcagtacaaggtgggttactgccagcaatgcccggagaaggtgcggtggcccaccgaattgggtcagcccccttctctttacttcaacgctggcatgttcgtgttcgaacccaacatcgccacctatcatgacctattgaaaacggtgcaagtcaccactcccacctcgttcgctgaacaagatttcttgaacatgtacttcaaggacatttacaagccaatccctttaaattacaatcttgtcctcgccatgctgtggcgccacccggaaaacgttaaattagaccaagtcaaggttgttcactattgcgcagcggggtccaagccatggagatatacggggaagtagcctaggcgtacgcaggtaagtttctgcttctacctttgatatatatataataattatcattaattagtagtaatataatatttcaaatatttttttcaaaataaaagaatgtagtatatagcaattgcttttctgtagtttataagtgtgtatattttaatttataacttttctaatatatgaccaaaacatggtgatgtgcaggtcctaggctacttccccgtatatctccatggcttggaccccgctgcgcaatagtgaacaaccttgacttggtctaatttaacgttttccgggtggcgccacagcatggcgaggacaagattgtaatttaaagggattggcttgtaaatgtccttgaagtacatgttcaagaaatcttgttcagcgaacgaggtgggagtggtgacttgcaccgttttcaataggtcatgataggtggcgatgttgggttcgaacacgaacatgccagcgttgaagtaaagagaagggggctgacccaattcggtgggccaccgcaccttctccgggcattgctggcagtaacccaccttgtactgaggggtgtgactccatgtcttctcgcagaaacaatccatcacagcgtaaaagttaccatcaggtaggtcaaataggtggtctatgttctcatatacctcaatgtctccgtccaagtatatcatcttgctgtactccacaaactcccatatacggagcttggagtagttgatgacctgcagttacttcccagtgaacctccaaggcttagacccagcagcacagtaatgaaccacttgaactttatcaagttcaacattttcagggtgacgccacaacatggccagcacaaggttgtacatgttcggtattggcttgtacttgtccttgaagtacatgttgagaaagtcctgctcagcaaaagaagtgggcttggtgagttggacagtttggagaagatcacggtaggtgtcgagattaggctcataaacaaacatgccagcattgaaatatagaggaggtttggaaccaaagtgagagggccattgaaccttatcagggcactgttggcagtacccaatctggaactgaggggtgtggctccaagtcttctcgcagaaacaatccatcaccgcatagaaataattatcaggcagatcaaacaagtggtctatgtttccaaatacttggatgtcaccgtctaggtatatcgtcttcttgtactccacgaactcccaaatacgtagcttggagtaattgatgacctcgagtcacttcccagtgtacctccaaggcttagacccagcagcacagtagtgaaccactttaactttgtcaagctcaacgttctcagggtgacgccacagcatggccagcacaagattgtagacattaggaattggcctatatttgtccttgaagtacatgttcaaaaaatcctgttcagcaaaggaagtgggctgggtgacttggactgtttgaaggaggtcacggtaagtagccaaattgggctcatacacaaacatgccagcattgaaatagagaggaggtttgggcccaaagtgagtgggccactgaaccttatgggggcactgctggcagtaaccgatctgatattgtttagtgtggccccaagttggctcacagaaacagtccatcaccgcatagaagtagttatcaggcaagtcaaacaagtggtcaatgttgtcaaaaacttggatatcaccgtctaggtatatcatcttgctgtactccacaaactcccaaatacgtagcttggaatagttgatgacttagtcgactagcggccgcgacacaagtgtgagagtactaaataaatgctttggttgtacgaaatcattacactaaataaaataatcaaagcttatatatgccttccgctaaggccgaatgcaaagaaattggttctttctcgttatcttttgccacttttactagtacgtattaattactacttaatcatctttgtttacggctcattatatccggtctaggccaaggccgcgaagttaaaagcaatgttgtcacttgtacgtactaacacatgatgtgatagtttatgctagctagctataacataagctgtctctgagtgtgttgtatattaataaagatcatcactggtgaatggtgatcgtgtacgtaccctacttagtaggcaatggaagcacttagagtgtgctttgtgcatggccttgcctctgttttgagacttttgtaatgttttcgagtttaaatctttgcctttgcgtacgtgggcggatcccctgca

SEQ ID NO: 32 - DNA, 3906 bp, artificial sequence
  plasmid pLF179
ctaaattgtaagcgttaatattttgttaaaattcgcgttaaatttttgttaaatcagctcattttttaaccaataggccgaaatcggcaaaatcccttataaatcaaaagaatagaccgagatagggttgagtggccgctacagggcgctcccattcgccattcaggctgcgcaactgttgggaagggcgtttcggtgcgggcctcttcgctattacgccagctggcgaaagggggatgtgctgcaaggcgattaagttgggtaacgccagggttttcccagtcacgacgttgtaaaacgacggccagtgagcgcgacgtaatacgactcactatagggcgaattggcggaaggccgtcaaggcctaggcgcgccatgagctctgcggccgctcagtcaagtttgcctttcctattcatcaagtcatggtagtatagcagtacacacataggttgaccaacgatactgaatatgaaccaaaaaatcatatttccaaccattgagtttttgaatttattttgcagataattagtgatcaagaccaaaggaacctgaaacataattccaccgaaagcccacaacttgaacatgtggcaaggaacagcaatgcacagctcatggaataaagcagaaaccaggaaggaaattaaaagagcagcagcctttggtagaccgtgccttaaacatggaaaatataggtggcggatcatccatttgtgaacaggcatattccacatcctccaataatcttcgacagttttggcattccaccaatccttgtagaattcacgatcaccaaatcgaagaagctctgccacgatatttaaccaaaggtggaaaaagcaatagaacatgcagagccacacatataaatttggaacagaaagcttcagaactctctcggtggcgtaaagaaggtttcccttgagaggatgctgtgaattttgtactatgggattaatatattgttctattataaatcccataactcctgtaaatactatcagcttgacaagttggcgaaacaaccaaccctttcgaatataaggtgtgcgaggatagcttggctggtaacataatgtaggggcaagcaggaaatatgccaagctcttgaaggttacgttgtaaggatactccatgttcagagtatcgagcagtgcttctcccttttcaactaatttggtaagtgctctcatatcatagtttgtatgtgcaaaagacaccaattttaaccatacaacacaagaaaacagcattaacgtgacacctgatacaaaagcagaatcacacttgagaataactaaaactggatagaaaagcgaagttgaggtaatgattatatgaagtacaacaacaactggttcgggtatacacttccgttgtgccaacttctccaccataaaggcagcgaaaggaaataccacaagagaaagacaacacatgaaaaggggccagtctctcaatgactttgcactaaaccaaaagccagatttgatcaaccaaccatacttcattaaattctcaatgatgagtcggctattcacagcaacaaggactactatacaaaggttgaagaggcccgcgtgactctgacggaaaatagtgtcggagctgagcggactttccttcactttgcggtgagcggggacggaaggacggtaggcgaatttgaggacggagaaatcagtgtcttgtttttcgttttgctgttgggaattgacggcggcgtcgtcgttgttgatggagtcgtcggaaccagaatccttggccaagtcatcaccggaactgtcggtggttgtctcaggcgaattgaagaggccggcggtggaggtggcggagggacggcggcgcagggaagagtggttgagagcagtggctacactttcaggctcatcggaaatcgccatggtgcggccgctggtacctcttaattaactggcctcatgggccttccgctcactgcccgctttccagtcgggaaacctgtcgtgccagctgcattaacatggtcatagctgtttccttgcgtattgggcgctctccgcttcctcgctcactgactcgctgcgctcggtcgttcgggtaaagcctggggtgcctaatgagcaaaaggccagcaaaaggccaggaaccgtaaaaaggccgcgttgctggcgtttttccataggctccgcccccctgacgagcatcacaaaaatcgacgctcaagtcagaggtggcgaaacccgacaggactataaagataccaggcgtttccccctggaagctccctcgtgcgctctcctgttccgaccctgccgcttaccggatacctgtccgcctttctcccttcgggaagcgtggcgctttctcatagctcacgctgtaggtatctcagttcggtgtaggtcgttcgctccaagctgggctgtgtgcacgaaccccccgttcagcccgaccgctgcgccttatccggtaactatcgtcttgagtccaacccggtaagacacgacttatcgccactggcagcagccactggtaacaggattagcagagcgaggtatgtaggcggtgctacagagttcttgaagtggtggcctaactacggctacactagaagaacagtatttggtatctgcgctctgctgaagccagttaccttcggaaaaagagttggtagctcttgatccggcaaacaaaccaccgctggtagcggtggtttttttgtttgcaagcagcagattacgcgcagaaaaaaaggatctcaagaagatcctttgatcttttctacggggtctgacgctcagtggaacgaaaactcacgttaagggattttggtcatgagattatcaaaaaggatcttcacctagatccttttaaattaaaaatgaagttttaaatcaatctaaagtatatatgagtaaacttggtctgacagttaccaatgcttaatcagtgaggcacctatctcagcgatctgtctatttcgttcatccatagttgcctgactccccgtcgtgtagataactacgatacgggagggcttaccatctggccccagtgctgcaatgataccgcgagaaccacgctcaccggctccagatttatcagcaataaaccagccagccggaagggccgagcgcagaagtggtcctgcaactttatccgcctccatccagtctattaattgttgccgggaagctagagtaagtagttcgccagttaatagtttgcgcaacgttgttgccattgctacaggcatcgtggtgtcacgctcgtcgtttggtatggcttcattcagctccggttcccaacgatcaaggcgagttacatgatcccccatgttgtgcaaaaaagcggttagctccttcggtcctccgatcgttgtcagaagtaagttggccgcagtgttatcactcatggttatggcagcactgcataattctcttactgtcatgccatccgtaagatgcttttctgtgactggtgagtactcaaccaagtcattctgagaatagtgtatgcggcgaccgagttgctcttgcccggcgtcaatacgggataataccgcgccacatagcagaactttaaaagtgctcatcattggaaaacgttcttcggggcgaaaactctcaaggatcttaccgctgttgagatccagttcgatgtaacccactcgtgcacccaactgatcttcagcatcttttactttcaccagcgtttctgggtgagcaaaaacaggaaggcaaaatgccgcaaaaaagggaataagggcgacacggaaatgttgaatactcatactcttcctttttcaatattattgaagcatttatcagggttattgtctcatgagcggatacatatttgaatgtatttagaaaaataaacaaataggggttccgcgcacatttccccgaaaagtgccac

SEQ ID NO: 33 - DNA, 5697 bp, artificial sequence
  plasmid pKR1995
ggccgcatttcgcaccaaatcaatgaaagtaataatgaaaagtctgaataagaatacttaggcttagatgcctttgttacttgtgtaaaataacttgagtcatgtacctttggcggaaacagaataaataaaaggtgaaattccaatgctctatgtataagttagtaatacttaatgtgttctacggttgtttcaatatcatcaaactctaattgaaactttagaaccacaaatctcaatcttttcttaatgaaatgaaaaatcttaattgtaccatgtttatgttaaacaccttacaattggttggagaggaggaccaaccgatgggacaacattgggagaaagagattcaatggagatttggataggagaacaacattctttttcacttcaatacaagatgagtgcaacactaaggatatgtatgagactttcagaagctacgacaacatagatgagtgaggtggtgattcctagcaagaaagacattagaggaagccaaaatcgaacaaggaagacatcaagggcaagagacaggaccatccatctcaggaaaaggagctttgggatagtccgagaagttgtacaagaaattttttggagggtgagtgatgcattgctggtgactttaactcaatcaaaattgagaaagaaagaaaagggagggggctcacatgtgaatagaagggaaacgggagaattttacagttttgatctaatgggcatcccagctagtggtaacatattcaccatgtttaaccttcacgtacgtctagaggatccccgggtaccgagctcgaattcactggccgtcgttttacaacgtcgtgactgggaaaaccctggcgttacccaacttaatcgccttgcagcacatccccctttcgccagctggcgtaatagcgaagaggcccgcaccgatcgcccttcccaacagttgcgcagcctgaatggcgaatggcgcctgatgcggtattttctccttacgcatctgtgcggtatttcacaccgcatatggtgcactctcagtacaatctgctctgatgccgcatagttaagccagccccgacacccgccaacacccgctgacgcgccctgacgggcttgtctgctcccggcatccgcttacagacaagctgtgaccgtctccgggagctgcatgtgtcagaggttttcaccgtcatcaccgaaacgcgcgagacgaaagggcctcgtgatacgcctatttttataggttaatgtcatgataataatggtttcttagacgtcaggtggcacttttcggggaaatgtgcgcggaacccctatttgtttatttttctaaatacattcaaatatgtatccgctcatgagacaataaccctgataaatgcttcaataatattgaaaaaggaagagtatgagtattcaacatttccgtgtcgcccttattcccttttttgcggcattttgccttcctgtttttgctcacccagaaacgctggtgaaagtaaaagatgctgaagatcagttgggtgcacgagtgggttacatcgaactggatctcaacagcggtaagatccttgagagttttcgccccgaagaacgttttccaatgatgagcacttttaaagttctgctatgtggcgcggtattatcccgtattgacgccgggcaagagcaactcggtcgccgcatacactattctcagaatgacttggttgagtactcaccagtcacagaaaagcatcttacggatggcatgacagtaagagaattatgcagtgctgccataaccatgagtgataacactgcggccaacttacttctgacaacgatcggaggaccgaaggagctaaccgcttttttgcacaacatgggggatcatgtaactcgccttgatcgttgggaaccggagctgaatgaagccataccaaacgacgagcgtgacaccacgatgcctgtagcaatggcaacaacgttgcgcaaactattaactggcgaactacttactctagcttcccggcaacaattaatagactggatggaggcggataaagttgcaggaccacttctgcgctcggcccttccggctggctggtttattgctgataaatctggagccggtgagcgtgggtctcgcggtatcattgcagcactggggccagatggtaagccctcccgtatcgtagttatctacacgacggggagtcaggcaactatggatgaacgaaatagacagatcgctgagataggtgcctcactgattaagcattggtaactgtcagaccaagtttactcatatatactttagattgatttaaaacttcatttttaatttaaaaggatctaggtgaagatcctttttgataatctcatgaccaaaatcccttaacgtgagttttcgttccactgagcgtcagaccccgtagaaaagatcaaaggatcttcttgagatcctttttttctgcgcgtaatctgctgcttgcaaacaaaaaaaccaccgctaccagcggtggtttgtttgccggatcaagagctaccaactctttttccgaaggtaactggcttcagcagagcgcagataccaaatactgtccttctagtgtagccgtagttaggccaccacttcaagaactctgtagcaccgcctacatacctcgctctgctaatcctgttaccagtggctgctgccagtggcgataagtcgtgtcttaccgggttggactcaagacgatagttaccggataaggcgcagcggtcgggctgaacggggggttcgtgcacacagcccagcttggagcgaacgacctacaccgaactgagatacctacagcgtgagctatgagaaagcgccacgcttcccgaagggagaaaggcggacaggtatccggtaagcggcagggtcggaacaggagagcgcacgagggagcttccagggggaaacgcctggtatctttatagtcctgtcgggtttcgccacctctgacttgagcgtcgatttttgtgatgctcgtcaggggggcggagcctatggaaaaacgccagcaacgcggcctttttacggttcctggccttttgctggccttttgctcacatgttctttcctgcgttatcccctgattctgtggataaccgtattaccgcctttgagtgagctgataccgctcgccgcagccgaacgaccgagcgcagcgagtcagtgagcgaggaagcggaagagcgcccaatacgcaaaccgcctctccccgcgcgttggccgattcattaatgcagctggcacgacaggtttcccgactggaaagcgggcagtgagcgcaacgcaattaatgtgagttagctcactcattaggcaccccaggctttacactttatgcttccggctcgtatgttgtgtggaattgtgagcggataacaatttcacacaggaaacagctatgaccatgattacgccaagcttgcatgcctgcagcccgggggatccgccctaagcttcgtacgctagcctaagtacgtactcaaaatgccaacaaataaaaaaaaagttgctttaataatgccaaaacaaattaataaaacacttacaacaccggattttttttaattaaaatgtgccatttaggataaatagttaatatttttaataattatttaaaaagccgtatctactaaaatgatttttatttggttgaaaatattaatatgtttaaatcaacacaatctatcaaaattaaactaaaaaaaaaataagtgtacgtggttaacattagtacagtaatataagaggaaaatgagaaattaagaaattgaaagcgagtctaatttttaaattatgaacctgcatatataaaaggaaagaaagaatccaggaagaaaagaaatgaaaccatgcatggtcccctcgtcatcacgagtttctgccatttgcaatagaaacactgaaacacctttctctttgtcacttaattgagatgccgaagccacctcacaccatgaacttcatgaggtgtagcacccaaggcttccatagccatgcatactgaagaatgtctcaagctcagcaccctacttctgtgacgtgtccctcattcaccttcctctcttccctataaataaccacgcctcaggttctccgcttcacaactcaaacattctctccattggtccttaaacactcatcagtcatcaccgcggccgcaccatggcgatttccgatgagcctgaaagtgtagccactgctctcaaccactcttccctgcgccgccgtccctccgccacctccaccgccggcctcttcaattcgcctgagacaaccaccgacagttccggtgatgacttggccaaggattctggttccgacgactccatcaacaacgacgacgccgccgtcaattcccaacagcaaaacgaaaaacaagacactgatttctccgtcctcaaattcgcctaccgtccttccgtccccgctcaccgcaaagtgaaggaaagtccgctcagctccgacactattttccgtcagagtcacgcgggcctcttcaacctttgtatagtagtccttgttgctgtgaatagccgactcatcattgagaatttaatgaagtatggttggttgatcaaatctggcttttggtttagtgcaaagtcattgagagactggccccttttcatgtgttgtctttctcttgtggtatttcctttcgctgcctttatggtggagaagttggcacaacggaagtgtatacccgaaccagttgttgttgtacttcatataatcattacctcaacttcgcttttctatccagttttagttattctcaagtgtgattctgcttttgtatcaggtgtcacgttaatgctgttttcttgtgttgtatggttaaaattggtgtcttttgcacatacaaactatgatatgagagcacttaccaaattagttgaaaagggagaagcactgctcgatactctgaacatggagtatccttacaacgtaaccttcaagagcttggcatatttcctgcttgcccctacattatgttaccagccaagctatcctcgcacaccttatattcgaaagggttggttgtttcgccaacttgtcaagctgatagtatttacaggagttatgggatttataatagaacaatatattaatcccatagtacaaaattcacagcatcctctcaagggaaaccttctttacgccaccgagagagttctgaagctttctgttccaaatttatatgtgtggctctgcatgttctattgctttttccacctttggttaaatatcgtggcagagcttcttcgatttggtgatcgtgaattctacaaggattggtggaatgccaaaactgtcgaagattattggaggatgtggaatatgcctgttcacaaatggatgatccgccacctatattttccatgtttaaggcacggtctaccaaaggctgctgctcttttaatttccttcctggtttctgctttattccatgagctgtgcattgctgttccttgccacatgttcaagttgtgggctttcggtggaattatgtttcaggttcctttggtcttgatcactaattatctgcaaaataaattcaaaaactcaatggttggaaatatgattttttggttcatattcagtatcgttggtcaacctatgtgtgtactgctatactaccatgacttgatgaataggaaaggcaaacttgactgagc

SEQ ID NO: 34 - DNA, 9112 bp, artificial sequence
  plasmid pKR2086
gtacgtctttccacaatacataactattaattaatcttaaataaataaaggataaaatatttttttttcttcataaagttaaaatatgttattttttgtttagatgtatattcgaataaatctaaatatatgataatgattttttatattgattaaacatataatcaatattaaatatgatatttttttatataggttgtacacataattttataaggataaaaaatatgataaaaataaattttaaatatttttatatttacgagaaaaaaaaatattttagccataaataaatgaccagcatattttacaaccttagtaattcataaattcctatatgtatatttgaaattaaaaacagataatcgttaagggaaggaatcctacgtcatctcttgccatttgtttttcatgcaaacagaaagggacgaaaaaccacctcaccatgaatcactcttcacaccatttttactagcaaacaagtctcaacaactgaagccagctctctttccgtttctttttacaacactttctttgaaatagtagtattttttttcacatgatttattaacgtgccaaaagatgcttattgaatagagtgcacatttgtaatgtactactaattagaacatgaaaaagcattgttctaacacgataatcctgtgaaggcgttaactccaaagatccaatttcactatataaattgtgacgaaagcaaaatgaattcacatagctgagagagaaaggaaaggttaactaagaagcaatacttcagcggccgcgcgagaaactttgtatgggcatggttatttctcacttctcaccctcctttactttcttatgctaaatcctccttcccctatatctccaccctcaacccctttttctcattataacttttggtgcctagatggtgtgtgtgtgtgcgcgcgagagatctgagctcaattttcctctctcaagtcctggtcatgctttgagggaaaagggttgaggaacttatgcatcttatatctctccacctccaggattttaagccctagttactcaacccttttccctcagaatatggcaattcaggcttttaattgctttcatttggtaccatcacttgcaagatttcagagtacaaggtgaacacacacatcttcctcttcatcaattctctagtttcatccttatcttttcattcacggtaactctcactaccctctttcatcttataagttataccgggggtgtgatgttgatgagtgtaaattaaatatatgtgatctctttctctggaaaaattttcagtgtgatatacataataatctcttaatctagagattttatggctttgttatatataagcggcgcaagggcgaattctgcagatatccatcacacttgggccgcttctagctagctagggtttgggtagtgagtgtaataaagttgcaaagtttttggttaggttacgttttgaccttattattatagttcaaagggaaacattaattaaaggggattatgaaggtggatgatgcctgattggattgaggatcttactgggtgaattgagctgcttagctatggatcccacagttctacccatcaataagtgcttttgtggtagtcttgtggcttccatatctggggagcttcatttgcctttatagtattaaccttcttccaatccagcatcatccaccacccttctcttcttttctctcataataatttaaatttgttatagactctaaactttaaatgttttttttgaagtttttccgtttttctcttttgccatgatcccgttcttgctgtggagtaaccttgtccgaggtatgtgcatgattagatccatacttaatttgtgtgcatcacgaaggtgaggttgaaatgaactttgcttttttgaccttttaggaaagttcttttgttgcagtaatcaattttaattagttttaattgacactattacttttattgtcatctttgttagttttattgttgaattgagtgcatatttcctaggaaattctcttacctaacattttttatacagatctatgctcttggctcttgcccttactcttggccttgtgttggttatttgtctacatatttattgactggtcgatgagacatgtcacaattcttgggcttatttgttggtctaataaaaggagtgcttattgaaagatcaagacggagattcggttttatataaataaactaaagatgacatattagtgtgttgatgtctcttcaggataatttttgtttgaaataatatggtaatgtcttgtctaaatttgtgtacataattcttactgatttttggattgttggatttttataaacaaatctggggccgcttctagctagctagggtttgggtagtgagtgtaataaagttgcaaagtttttggttaggttacgttttgaccttattattatagttcaaagggaaacattaattaaaggggattatgaagtgggctctcttgattcttggatgaggatcttactgggtgaattgagctgcttagctatggatcccacagttctacccatcaataagtgcttttgtggtagtcttgtggcttccatatctggggagcttcatttgcctttatagtattaaccttctccaagaacaaagagagcccacacccttctcttcttttctctcataataatttaaatttgttatagactctaaactttaaatgttttttttgaagtttttccgtttttctcttttgccatgatcccgttcttgctgtggagtaaccttgtccgaggtatgtgcatgattagatccatacttaatttgtgtgcatcacgaaggtgaggttgaaatgaactttgcttttttgaccttttaggaaagttcttttgttgcagtaatcaattttaattagttttaattgacactattacttttattgtcatctttgttagttttattgttgaattgagtgcatatttcctaggaaattctcttacctaacattttttatacagatctatgctcttggctcttgcccttactcttggccttgtgttggttatttgtctacatatttattgactggtcgatgagacatgtcacaattcttgggcttatttgttggtctaataaaaggagtgcttattgaaagatcaagacggagattcggttttatataaataaactaaagatgacatattagtgtgttgatgtctcttcaggataatttttgtttgaaataatatggtaatgtcttgtctaaatttgtgtacataattcttactgattttttggattgttggatttttataaacaaatctggggcccaagcggccgcatgagccgtaaaggttcaatacaacgagtgcttgttttcttagggacaagcattgtacttatgtatgattctgtgtaaccatgagtcttccacgttgtactaatgtgaagggcaaaaataaaacacagaacaagttcgtttttctcaaataatgtgaaggtagaaaatggaaccatgcctcctctcttgcatgtgatttaaaatattagcagatggtacgtcgagtcgacctgcaggagatccaagcttggcgcgccgttctatagtgtcacctaaatcgtatgtgtatgatacataaggttatgtattaattgtagccgcgttctaacgacaatatgtccatatggtgcactctcagtacaatctgctctgatgccgcatagttaagccagccccgacacccgccaacacccgctgacgcgccctgacgggcttgtctgctcccggcatccgcttacagacaagctgtgaccgtctccgggagctgcatgtgtcagaggttttcaccgtcatcaccgaaacgcgcgagacgaaagggcctcgtgatacgcctatttttataggttaatgtcatgaccaaaatcccttaacgtgagttttcgttccactgagcgtcagaccccgtagaaaagatcaaaggatcttcttgagatcctttttttctgcgcgtaatctgctgcttgcaaacaaaaaaaccaccgctaccagcggtggtttgtttgccggatcaagagctaccaactctttttccgaaggtaactggcttcagcagagcgcagataccaaatactgtccttctagtgtagccgtagttaggccaccacttcaagaactctgtagcaccgcctacatacctcgctctgctaatcctgttaccagtggctgctgccagtggcgataagtcgtgtcttaccgggttggactcaagacgatagttaccggataaggcgcagcggtcgggctgaacggggggttcgtgcacacagcccagcttggagcgaacgacctacaccgaactgagatacctacagcgtgagcattgagaaagcgccacgcttcccgaagggagaaaggcggacaggtatccggtaagcggcagggtcggaacaggagagcgcacgagggagcttccagggggaaacgcctggtatctttatagtcctgtcgggtttcgccacctctgacttgagcgtcgatttttgtgatgctcgtcaggggggcggagcctatggaaaaacgccagcaacgcggcctttttacggttcctggccttttgctggccttttgctcacatgttctttcctgcgttatcccctgattctgtggataaccgtattaccgcctttgagtgagctgataccgctcgccgcagccgaacgaccgagcgcagcgagtcagtgagcgaggaagcggaagagcgcccaatacgcaaaccgcctctccccgcgcgttggccgattcattaatgcaggttgatcagatctcgatcccgcgaaattaatacgactcactatagggagaccacaacggtttccctctagaaataattttgtttaactttaagaaggagatatacccatggaaaagcctgaactcaccgcgacgtctgtcgagaagtttctgatcgaaaagttcgacagcgtctccgacctgatgcagctctcggagggcgaagaatctcgtgctttcagcttcgatgtaggagggcgtggatatgtcctgcgggtaaatagctgcgccgatggtttctacaaagatcgttatgtttatcggcactttgcatcggccgcgctcccgattccggaagtgcttgacattggggaattcagcgagagcctgacctattgcatctcccgccgtgcacagggtgtcacgttgcaagacctgcctgaaaccgaactgcccgctgttctgcagccggtcgcggaggctatggatgcgatcgctgcggccgatcttagccagacgagcgggttcggcccattcggaccgcaaggaatcggtcaatacactacatggcgtgatttcatatgcgcgattgctgatccccatgtgtatcactggcaaactgtgatggacgacaccgtcagtgcgtccgtcgcgcaggctctcgatgagctgatgctttgggccgaggactgccccgaagtccggcacctcgtgcacgcggatttcggctccaacaatgtcctgacggacaatggccgcataacagcggtcattgactggagcgaggcgatgttcggggattcccaatacgaggtcgccaacatcttcttctggaggccgtggttggcttgtatggagcagcagacgcgctacttcgagcggaggcatccggagcttgcaggatcgccgcggctccgggcgtatatgctccgcattggtcttgaccaactctatcagagcttggttgacggcaatttcgatgatgcagcttgggcgcagggtcgatgcgacgcaatcgtccgatccggagccgggactgtcgggcgtacacaaatcgcccgcagaagcgcggccgtctggaccgatggctgtgtagaagtactcgccgatagtggaaaccgacgccccagcactcgtccgagggcaaaggaatagtgaggtacagcttggatcgatccggctgctaacaaagcccgaaaggaagctgagttggctgctgccaccgctgagcaataactagcataaccccttggggcctctaaacgggtcttgaggggttttttgctgaaaggaggaactatatccggatgatcgggcgcgccgtcgacggatccgtacgctagcctaagtacgtactcaaaatgccaacaaataaaaaaaaagttgctttaataatgccaaaacaaattaataaaacacttacaacaccggattttttttaattaaaatgtgccatttaggataaatagttaatatttttaataattatttaaaaagccgtatctactaaaatgatttttatttggttgaaaatattaatatgtttaaatcaacacaatctatcaaaattaaactaaaaaaaaaataagtgtacgtggttaacattagtacagtaatataagaggaaaatgagaaattaagaaattgaaagcgagtctaatttttaaattatgaacctgcatatataaaaggaaagaaagaatccaggaagaaaagaaatgaaaccatgcatggtcccctcgtcatcacgagtttctgccatttgcaatagaaacactgaaacacctttctctttgtcacttaattgagatgccgaagccacctcacaccatgaacttcatgaggtgtagcacccaaggcttccatagccatgcatactgaagaatgtctcaagctcagcaccctacttctgtgacgtgtccctcattcaccttcctctcttccctataaataaccacgcctcaggttctccgcttcacaactcaaacattctctccattggtccttaaacactcatcagtcatcaccgcggccgcaccatggcgatttccgatgagcctgaaagtgtagccactgctctcaaccactcttccctgcgccgccgtccctccgccacctccaccgccggcctcttcaattcgcctgagacaaccaccgacagttccggtgatgacttggccaaggattctggttccgacgactccatcaacaacgacgacgccgccgtcaattcccaacagcaaaacgaaaaacaagacactgatttctccgtcctcaaattcgcctaccgtccttccgtccccgctcaccgcaaagtgaaggaaagtccgctcagctccgacactattttccgtcagagtcacgcgggcctcttcaacctttgtatagtagtccttgttgctgtgaatagccgactcatcattgagaatttaatgaagtatggttggttgatcaaatctggcttttggtttagtgcaaagtcattgagagactggccccttttcatgtgttgtctttctcttgtggtatttcctttcgctgcctttatggtggagaagttggcacaacggaagtgtatacccgaaccagttgttgttgtacttcatataatcattacctcaacttcgcttttctatccagttttagttattctcaagtgtgattctgcttttgtatcaggtgtcacgttaatgctgttttcttgtgttgtatggttaaaattggtgtcttttgcacatacaaactatgatatgagagcacttaccaaattagttgaaaagggagaagcactgctcgatactctgaacatggagtatccttacaacgtaaccttcaagagcttggcatatttcctgcttgcccctacattatgttaccagccaagctatcctcgcacaccttatattcgaaagggttggttgtttcgccaacttgtcaagctgatagtatttacaggagttatgggatttataatagaacaatatattaatcccatagtacaaaattcacagcatcctctcaagggaaaccttctttacgccaccgagagagttctgaagctttctgttccaaatttatatgtgtggctctgcatgttctattgctttttccacctttggttaaatatcgtggcagagcttcttcgatttggtgatcgtgaattctacaaggattggtggaatgccaaaactgtcgaagattattggaggatgtggaatatgcctgttcacaaatggatgatccgccacctatattttccatgtttaaggcacggtctaccaaaggctgctgctcttttaatttccttcctggtttctgctttattccatgagctgtgcattgctgttccttgccacatgttcaagttgtgggctttcggtggaattatgtttcaggttcctttggtcttgatcactaattatctgcaaaataaattcaaaaactcaatggttggaaatatgattttttggttcatattcagtatcgttggtcaacctatgtgtgtactgctatactaccatgacttgatgaataggaaaggcaaacttgactgagcggccgcatttcgcaccaaatcaatgaaagtaataatgaaaagtctgaataagaatacttaggcttagatgcctttgttacttgtgtaaaataacttgagtcatgtacctttggcggaaacagaataaataaaaggtgaaattccaatgctctatgtataagttagtaatacttaatgtgttctacggttgtttcaatatcatcaaactctaattgaaactttagaaccacaaatctcaatcttttcttaatgaaatgaaaaatcttaattgtaccatgtttatgttaaacaccttacaattggttggagaggaggaccaaccgatgggacaacattgggagaaagagattcaatggagatttggataggagaacaacattctttttcacttcaatacaagatgagtgcaacactaaggatatgtatgagactttcagaagctacgacaacatagatgagtgaggtggtgattcctagcaagaaagacattagaggaagccaaaatcgaacaaggaagacatcaagggcaagagacaggaccatccatctcaggaaaaggagctttgggatagtccgagaagttgtacaagaaattttttggagggtgagtgatgcattgctggtgactttaactcaatcaaaattgagaaagaaagaaaagggagggggctcacatgtgaatagaagggaaacgggagaattttacagttttgatctaatgggcatcccagctagtggtaacatattcaccatgtttaaccttcac

SEQ ID NO: 35 - DNA, 13271 bp, artificial sequence
  plasmid pKR2088
cgcgccggaattaattaggtaatttcacgcgccggatccttaattaagtctagagtcgactgtttaattctagtggccggcccagctgatgatcccggtgaagttcctattccgaagttcctattctccagaaagtataggaacttcactagagcttgcggccgctcgagttctatagtgtcacctaaatcgtatgtgtatgatacataaggttatgtattaattgtagccgcgttctaacgacaatatgtccatatggtgcactctcagtacaatctgctctgatgccgcatagttaagccagccccgacacccgccaacacccgctgacgcgccctgacgggcttgtctgctcccggcatccgcttacagacaagctgtgaccgtctccgggagctgcatgtgtcagaggttttcaccgtcatcaccgaaacgcgcgagacgaaagggcctcgtgatacgcctatttttataggttaatgtcatgaccaaaatcccttaacgtgagttttcgttccactgagcgtcagaccccgtagaaaagatcaaaggatcttcttgagatcctttttttctgcgcgtaatctgctgcttgcaaacaaaaaaaccaccgctaccagcggtggtttgtttgccggatcaagagctaccaactctttttccgaaggtaactggcttcagcagagcgcagataccaaatactgtccttctagtgtagccgtagttaggccaccacttcaagaactctgtagcaccgcctacatacctcgctctgctaatcctgttaccagtggctgctgccagtggcgataagtcgtgtcttaccgggttggactcaagacgatagttaccggataaggcgcagcggtcgggctgaacggggggttcgtgcacacagcccagcttggagcgaacgacctacaccgaactgagatacctacagcgtgagcattgagaaagcgccacgcttcccgaagggagaaaggcggacaggtatccggtaagcggcagggtcggaacaggagagcgcacgagggagcttccagggggaaacgcctggtatctttatagtcctgtcgggtttcgccacctctgacttgagcgtcgatttttgtgatgctcgtcaggggggcggagcctatggaaaaacgccagcaacgcggcctttttacggttcctggccttttgctggccttttgctcacatgttctttcctgcgttatcccctgattctgtggataaccgtattaccgcctttgagtgagctgataccgctcgccgcagccgaacgaccgagcgcagcgagtcagtgagcgaggaagcggaagagcgcccaatacgcaaaccgcctctccccgcgcgttggccgattcattaatgcaggttgatcagatctcgatcccgcgaaattaatacgactcactatagggagaccacaacggtttccctctagaaataattttgtttaactttaagaaggagatatacccatggaaaagcctgaactcaccgcgacgtctgtcgagaagtttctgatcgaaaagttcgacagcgtctccgacctgatgcagctctcggagggcgaagaatctcgtgctttcagcttcgatgtaggagggcgtggatatgtcctgcgggtaaatagctgcgccgatggtttctacaaagatcgttatgtttatcggcactttgcatcggccgcgctcccgattccggaagtgcttgacattggggaattcagcgagagcctgacctattgcatctcccgccgtgcacagggtgtcacgttgcaagacctgcctgaaaccgaactgcccgctgttctgcagccggtcgcggaggctatggatgcgatcgctgcggccgatcttagccagacgagcgggttcggcccattcggaccgcaaggaatcggtcaatacactacatggcgtgatttcatatgcgcgattgctgatccccatgtgtatcactggcaaactgtgatggacgacaccgtcagtgcgtccgtcgcgcaggctctcgatgagctgatgctttgggccgaggactgccccgaagtccggcacctcgtgcacgcggatttcggctccaacaatgtcctgacggacaatggccgcataacagcggtcattgactggagcgaggcgatgttcggggattcccaatacgaggtcgccaacatcttcttctggaggccgtggttggcttgtatggagcagcagacgcgctacttcgagcggaggcatccggagcttgcaggatcgccgcggctccgggcgtatatgctccgcattggtcttgaccaactctatcagagcttggttgacggcaatttcgatgatgcagcttgggcgcagggtcgatgcgacgcaatcgtccgatccggagccgggactgtcgggcgtacacaaatcgcccgcagaagcgcggccgtctggaccgatggctgtgtagaagtactcgccgatagtggaaaccgacgccccagcactcgtccgagggcaaaggaatagtgaggtacagcttggatcgatccggctgctaacaaagcccgaaaggaagctgagttggctgctgccaccgctgagcaataactagcataaccccttggggcctctaaacgggtcttgaggggttttttgctgaaaggaggaactatatccggatgatcgtcgaggcctcacgtgttaacaagcttgataaactctaggcttgttgtgcagtttttgaagtataacaacagaagttcctattccgaagttcctattctctagaaagtataggaacttccaccacacaacacaatggcggccaccgcttccagaaccacccgattctcttcttcctcttcacaccccaccttccccaaacgcattactagatccaccctccctctctctcatcaaaccctcaccaaacccaaccacgctctcaaaatcaaatgttccatctccaaaccccccacggcggcgcccttcaccaaggaagcgccgaccacggagcccttcgtgtcacggttcgcctccggcgaacctcgcaagggcgcggacatccttgtggaggcgctggagaggcagggcgtgacgacggtgttcgcgtaccccggcggtgcgtcgatggagatccaccaggcgctcacgcgctccgccgccatccgcaacgtgctcccgcgccacgagcagggcggcgtcttcgccgccgaaggctacgcgcgttcctccggcctccccggcgtctgcattgccacctccggccccggcgccaccaacctcgtgagcggcctcgccgacgctttaatggacagcgtcccagtcgtcgccatcaccggccaggtcagccgccggatgatcggcaccgacgccttccaagaaaccccgatcgtggaggtgagcagatccatcacgaagcacaactacctcatcctcgacgtcgacgacatcccccgcgtcgtcgccgaggctttcttcgtcgccacctccggccgccccggtccggtcctcatcgacattcccaaagacgttcagcagcaactcgccgtgcctaattgggacgagcccgttaacctccccggttacctcgccaggctgcccaggccccccgccgaggcccaattggaacacattgtcagactcatcatggaggcccaaaagcccgttctctacgtcggcggtggcagtttgaattccagtgctgaattgaggcgctttgttgaactcactggtattcccgttgctagcactttaatgggtcttggaacttttcctattggtgatgaatattcccttcagatgctgggtatgcatggtactgtttatgctaactatgctgttgacaatagtgatttgttgcttgcctttggggtaaggtttgatgaccgtgttactgggaagcttgaggcttttgctagtagggctaagattgttcacattgatattgattctgccgagattgggaagaacaagcaggcgcacgtgtcggtttgcgcggatttgaagttggccttgaagggaattaatatgattttggaggagaaaggagtggagggtaagtttgatcttggaggttggagagaagagattaatgtgcagaaacacaagtttccattgggttacaagacattccaggacgcgatttctccgcagcatgctatcgaggttcttgatgagttgactaatggagatgctattgttagtactggggttgggcagcatcaaatgtgggctgcgcagttttacaagtacaagagaccgaggcagtggttgacctcagggggtcttggagccatgggttttggattgcctgcggctattggtgctgctgttgctaaccctggggctgttgtggttgacattgatggggatggtagtttcatcatgaatgttcaggagttggccactataagagtggagaatctcccagttaagatattgttgttgaacaatcagcatttgggtatggtggttcagtgggaggataggttctacaagtccaatagagctcacacctatcttggagatccgtctagcgagagcgagatattcccaaacatgctcaagtttgctgatgcttgtgggataccggcagcgcgagtgacgaagaaggaagagcttagagcggcaattcagagaatgttggacacccctggcccctaccttcttgatgtcattgtgccccatcaggagcatgtgttgccgatgattcccagtaatggatccttcaaggatgtgataactgagggtgatggtagaacgaggtactgattgcctagaccaaatgttccttgatgcttgttttgtacaatatatataagataatgctgtcctagttgcaggatttggcctgtggtgagcatcatagtctgtagtagttttggtagcaagacattttattttccttttatttaacttactacatgcagtagcatctatctatctctgtagtctgatatctcctgttgtctgtattgtgccgttggattttttgctgtagtgagactgaaaatgatgtgctagtaataatatttctgttagaaatctaagtagagaatctgttgaagaagtcaaaagctaatggaatcaggttacatattcaatgtttttctttttttagcggttggtagacgtgtagattcaacttctcttggagctcacctaggcaatcagtaaaatgcatattccttttttaacttgccatttatttacttttagtggaaattgtgaccaatttgttcatgtagaacggatttggaccattgcgtccacaaaacgtctcttttgctcgatcttcacaaagcgataccgaaatccagagatagttttcaaaagtcagaaatggcaaagttataaatagtaaaacagaatagatgctgtaatcgacttcaataacaagtggcatcacgtttctagttctagacccatcagctgggccatcaagcttatcgataccgtcggcgcggggtacgttagctgattaagtcagcatgcgcggccggcgtatgaactaaaatgcatgtaggtgtaagagctcatggagagcatggaatattgtatccgaccatgtaacagtataataactgagctccatctcacttcttctatgaataaacaaaggatgttatgatatattaacactctatctatgcaccttattgttctatgataaatttcctcttattattataaatcatctgaatcgtgacggcttatggaatgcttcaaatagtacaaaaacaaatgtgtactataagactttctaaacaattctaaccttagcattgtgaacgagacataagtgttaagaagacataacaattataatggaagaagtttgtctccatttatatattatatattacccacttatgtattatattaggatgttaaggagacataacaattataaagagagaagtttgtatccatttatatattatatactacccatttatatattatacttatccacttatttaatgtctttataaggtttgatccatgatatttctaatattttagttgatatgtatatgaaaaggtactatttgaactctcttactctgtataaaggttggatcatccttaaagtgggtctatttaattttattgcttcttacagataaaaaaaaaattatgagttggtttgataaaatattgaaggatttaaaataataataaataacatataatatatgtatataaatttattataatataacatttatctataaaaaagtaaatattgtcataaatctatacaatcgtttagccttgctggaacgaatctcaattatttaaacgagagtaaacatatttgactttttggttatttaacaaattattatttaacactatatgaaatttttttttttatcagcaaagaataaaattaaattaagaaggacaatggtgtcccaatccttatacaaccaacttccacaagaaagtcaagtcagagacaacaaaaaaacaagcaaaggaaattttttaatttgagttgtcttgtttgctgcataatttatgcagtaaaacactacacataacccttttagcagtagagcaatggttgaccgtgtgcttagcttcttttattttatttttttatcagcaaagaataaataaaataaaatgagacacttcagggatgtttcaacaggtacccatcacttaagtggcgcgccgtcgacggatccgtacgctagcctaagtacgtactcaaaatgccaacaaataaaaaaaaagttgctttaataatgccaaaacaaattaataaaacacttacaacaccggattttttttaattaaaatgtgccatttaggataaatagttaatatttttaataattatttaaaaagccgtatctactaaaatgatttttatttggttgaaaatattaatatgtttaaatcaacacaatctatcaaaattaaactaaaaaaaaaataagtgtacgtggttaacattagtacagtaatataagaggaaaatgagaaattaagaaattgaaagcgagtctaatttttaaattatgaacctgcatatataaaaggaaagaaagaatccaggaagaaaagaaatgaaaccatgcatggtcccctcgtcatcacgagtttctgccatttgcaatagaaacactgaaacacctttctctttgtcacttaattgagatgccgaagccacctcacaccatgaacttcatgaggtgtagcacccaaggcttccatagccatgcatactgaagaatgtctcaagctcagcaccctacttctgtgacgtgtccctcattcaccttcctctcttccctataaataaccacgcctcaggttctccgcttcacaactcaaacattctctccattggtccttaaacactcatcagtcatcaccgcggccgcaccatggcgatttccgatgagcctgaaagtgtagccactgctctcaaccactcttccctgcgccgccgtccctccgccacctccaccgccggcctcttcaattcgcctgagacaaccaccgacagttccggtgatgacttggccaaggattctggttccgacgactccatcaacaacgacgacgccgccgtcaattcccaacagcaaaacgaaaaacaagacactgatttctccgtcctcaaattcgcctaccgtccttccgtccccgctcaccgcaaagtgaaggaaagtccgctcagctccgacactattttccgtcagagtcacgcgggcctcttcaacctttgtatagtagtccttgttgctgtgaatagccgactcatcattgagaatttaatgaagtatggttggttgatcaaatctggcttttggtttagtgcaaagtcattgagagactggccccttttcatgtgttgtctttctcttgtggtatttcctttcgctgcctttatggtggagaagttggcacaacggaagtgtatacccgaaccagttgttgttgtacttcatataatcattacctcaacttcgcttttctatccagttttagttattctcaagtgtgattctgcttttgtatcaggtgtcacgttaatgctgttttcttgtgttgtatggttaaaattggtgtcttttgcacatacaaactatgatatgagagcacttaccaaattagttgaaaagggagaagcactgctcgatactctgaacatggagtatccttacaacgtaaccttcaagagcttggcatatttcctgcttgcccctacattatgttaccagccaagctatcctcgcacaccttatattcgaaagggttggttgtttcgccaacttgtcaagctgatagtatttacaggagttatgggatttataatagaacaatatattaatcccatagtacaaaattcacagcatcctctcaagggaaaccttctttacgccaccgagagagttctgaagctttctgttccaaatttatatgtgtggctctgcatgttctattgctttttccacctttggttaaatatcgtggcagagcttcttcgatttggtgatcgtgaattctacaaggattggtggaatgccaaaactgtcgaagattattggaggatgtggaatatgcctgttcacaaatggatgatccgccacctatattttccatgtttaaggcacggtctaccaaaggctgctgctcttttaatttccttcctggtttctgctttattccatgagctgtgcattgctgttccttgccacatgttcaagttgtgggctttcggtggaattatgtttcaggttcctttggtcttgatcactaattatctgcaaaataaattcaaaaactcaatggttggaaatatgattttttggttcatattcagtatcgttggtcaacctatgtgtgtactgctatactaccatgacttgatgaataggaaaggcaaacttgactgagcggccgcatttcgcaccaaatcaatgaaagtaataatgaaaagtctgaataagaatacttaggcttagatgcctttgttacttgtgtaaaataacttgagtcatgtacctttggcggaaacagaataaataaaaggtgaaattccaatgctctatgtataagttagtaatacttaatgtgttctacggttgtttcaatatcatcaaactctaattgaaactttagaaccacaaatctcaatcttttcttaatgaaatgaaaaatcttaattgtaccatgtttatgttaaacaccttacaattggttggagaggaggaccaaccgatgggacaacattgggagaaagagattcaatggagatttggataggagaacaacattctttttcacttcaatacaagatgagtgcaacactaaggatatgtatgagactttcagaagctacgacaacatagatgagtgaggtggtgattcctagcaagaaagacattagaggaagccaaaatcgaacaaggaagacatcaagggcaagagacaggaccatccatctcaggaaaaggagctttgggatagtccgagaagttgtacaagaaattttttggagggtgagtgatgcattgctggtgactttaactcaatcaaaattgagaaagaaagaaaagggagggggctcacatgtgaatagaagggaaacgggagaattttacagttttgatctaatgggcatcccagctagtggtaacatattcaccatgtttaaccttcacgtacgtctttccacaatacataactattaattaatcttaaataaataaaggataaaatatttttttttcttcataaagttaaaatatgttattttttgtttagatgtatattcgaataaatctaaatatatgataatgattttttatattgattaaacatataatcaatattaaatatgatatttttttatataggttgtacacataattttataaggataaaaaatatgataaaaataaattttaaatatttttatatttacgagaaaaaaaaatattttagccataaataaatgaccagcatattttacaaccttagtaattcataaattcctatatgtatatttgaaattaaaaacagataatcgttaagggaaggaatcctacgtcatctcttgccatttgtttttcatgcaaacagaaagggacgaaaaaccacctcaccatgaatcactcttcacaccatttttactagcaaacaagtctcaacaactgaagccagctctctttccgtttctttttacaacactttctttgaaatagtagtattttttttcacatgatttattaacgtgccaaaagatgcttattgaatagagtgcacatttgtaatgtactactaattagaacatgaaaaagcattgttctaacacgataatcctgtgaaggcgttaactccaaagatccaatttcactatataaattgtgacgaaagcaaaatgaattcacatagctgagagagaaaggaaaggttaactaagaagcaatacttcagcggccgcgcgagaaactttgtatgggcatggttatttctcacttctcaccctcctttactttcttatgctaaatcctccttcccctatatctccaccctcaacccctttttctcattataacttttggtgcctagatggtgtgtgtgtgtgcgcgcgagagatctgagctcaattttcctctctcaagtcctggtcatgctttgagggaaaagggttgaggaacttatgcatcttatatctctccacctccaggattttaagccctagttactcaacccttttccctcagaatatggcaattcaggcttttaattgctttcatttggtaccatcacttgcaagatttcagagtacaaggtgaacacacacatcttcctcttcatcaattctctagtttcatccttatcttttcattcacggtaactctcactaccctctttcatcttataagttataccgggggtgtgatgttgatgagtgtaaattaaatatatgtgatctctttctctggaaaaattttcagtgtgatatacataataatctcttaatctagagattttatggctttgttatatataagcggcgcaagggcgaattctgcagatatccatcacacttgggccgcttctagctagctagggtttgggtagtgagtgtaataaagttgcaaagtttttggttaggttacgttttgaccttattattatagttcaaagggaaacattaattaaaggggattatgaaggtggatgatgcctgattggattgaggatcttactgggtgaattgagctgcttagctatggatcccacagttctacccatcaataagtgcttttgtggtagtcttgtggcttccatatctggggagcttcatttgcctttatagtattaaccttcttccaatccagcatcatccaccacccttctcttcttttctctcataataatttaaatttgttatagactctaaactttaaatgttttttttgaagtttttccgtttttctcttttgccatgatcccgttcttgctgtggagtaaccttgtccgaggtatgtgcatgattagatccatacttaatttgtgtgcatcacgaaggtgaggttgaaatgaactttgcttttttgaccttttaggaaagttcttttgttgcagtaatcaattttaattagttttaattgacactattacttttattgtcatctttgttagttttattgttgaattgagtgcatatttcctaggaaattctcttacctaacattttttatacagatctatgctcttggctcttgcccttactcttggccttgtgttggttatttgtctacatatttattgactggtcgatgagacatgtcacaattcttgggcttatttgttggtctaataaaaggagtgcttattgaaagatcaagacggagattcggttttatataaataaactaaagatgacatattagtgtgttgatgtctcttcaggataatttttgtttgaaataatatggtaatgtcttgtctaaatttgtgtacataattcttactgatttttggattgttggatttttataaacaaatctggggccgcttctagctagctagggtttgggtagtgagtgtaataaagttgcaaagtttttggttaggttacgttttgaccttattattatagttcaaagggaaacattaattaaaggggattatgaagtgggctctcttgattcttggatgaggatcttactgggtgaattgagctgcttagctatggatcccacagttctacccatcaataagtgcttttgtggtagtcttgtggcttccatatctggggagcttcatttgcctttatagtattaaccttctccaagaacaaagagagcccacacccttctcttcttttctctcataataatttaaatttgttatagactctaaactttaaatgttttttttgaagtttttccgtttttctcttttgccatgatcccgttcttgctgtggagtaaccttgtccgaggtatgtgcatgattagatccatacttaatttgtgtgcatcacgaaggtgaggttgaaatgaactttgcttttttgaccttttaggaaagttcttttgttgcagtaatcaattttaattagttttaattgacactattacttttattgtcatctttgttagttttattgttgaattgagtgcatatttcctaggaaattctcttacctaacattttttatacagatctatgctcttggctcttgcccttactcttggccttgtgttggttatttgtctacatatttattgactggtcgatgagacatgtcacaattcttgggcttatttgttggtctaataaaaggagtgcttattgaaagatcaagacggagattcggttttatataaataaactaaagatgacatattagtgtgttgatgtctcttcaggataatttttgtttgaaataatatggtaatgtcttgtctaaatttgtgtacataattcttactgattttttggattgttggatttttataaacaaatctggggcccaagcggccgcatgagccgtaaaggttcaatacaacgagtgcttgttttcttagggacaagcattgtacttatgtatgattctgtgtaaccatgagtcttccacgttgtactaatgtgaagggcaaaaataaaacacagaacaagttcgtttttctcaaataatgtgaaggtagaaaatggaaccatgcctcctctcttgcatgtgatttaaaatattagcagatggtacgtcgagtcgacctgcaggagatccaagcttgg

SEQ ID NO: 36 - DNA, 19260 bp, artificial sequence
  plasmid pKR2102 (PHP52247)
  misc_feature (14463)..(14463): n is a, c, g, or t
ggagatccaagcttggcgcgccggaattaattaggtaatttcacgcgccggatccttaattaagtctagagtcgactgtttaattctagtggccggcccagctgatgatcccggtgaagttcctattccgaagttcctattctccagaaagtataggaacttcactagagcttgcggccgctcgagttctatagtgtcacctaaatcgtatgtgtatgatacataaggttatgtattaattgtagccgcgttctaacgacaatatgtccatatggtgcactctcagtacaatctgctctgatgccgcatagttaagccagccccgacacccgccaacacccgctgacgcgccctgacgggcttgtctgctcccggcatccgcttacagacaagctgtgaccgtctccgggagctgcatgtgtcagaggttttcaccgtcatcaccgaaacgcgcgagacgaaagggcctcgtgatacgcctatttttataggttaatgtcatgaccaaaatcccttaacgtgagttttcgttccactgagcgtcagaccccgtagaaaagatcaaaggatcttcttgagatcctttttttctgcgcgtaatctgctgcttgcaaacaaaaaaaccaccgctaccagcggtggtttgtttgccggatcaagagctaccaactctttttccgaaggtaactggcttcagcagagcgcagataccaaatactgtccttctagtgtagccgtagttaggccaccacttcaagaactctgtagcaccgcctacatacctcgctctgctaatcctgttaccagtggctgctgccagtggcgataagtcgtgtcttaccgggttggactcaagacgatagttaccggataaggcgcagcggtcgggctgaacggggggttcgtgcacacagcccagcttggagcgaacgacctacaccgaactgagatacctacagcgtgagcattgagaaagcgccacgcttcccgaagggagaaaggcggacaggtatccggtaagcggcagggtcggaacaggagagcgcacgagggagcttccagggggaaacgcctggtatctttatagtcctgtcgggtttcgccacctctgacttgagcgtcgatttttgtgatgctcgtcaggggggcggagcctatggaaaaacgccagcaacgcggcctttttacggttcctggccttttgctggccttttgctcacatgttctttcctgcgttatcccctgattctgtggataaccgtattaccgcctttgagtgagctgataccgctcgccgcagccgaacgaccgagcgcagcgagtcagtgagcgaggaagcggaagagcgcccaatacgcaaaccgcctctccccgcgcgttggccgattcattaatgcaggttgatcagatctcgatcccgcgaaattaatacgactcactatagggagaccacaacggtttccctctagaaataattttgtttaactttaagaaggagatatacccatggaaaagcctgaactcaccgcgacgtctgtcgagaagtttctgatcgaaaagttcgacagcgtctccgacctgatgcagctctcggagggcgaagaatctcgtgctttcagcttcgatgtaggagggcgtggatatgtcctgcgggtaaatagctgcgccgatggtttctacaaagatcgttatgtttatcggcactttgcatcggccgcgctcccgattccggaagtgcttgacattggggaattcagcgagagcctgacctattgcatctcccgccgtgcacagggtgtcacgttgcaagacctgcctgaaaccgaactgcccgctgttctgcagccggtcgcggaggctatggatgcgatcgctgcggccgatcttagccagacgagcgggttcggcccattcggaccgcaaggaatcggtcaatacactacatggcgtgatttcatatgcgcgattgctgatccccatgtgtatcactggcaaactgtgatggacgacaccgtcagtgcgtccgtcgcgcaggctctcgatgagctgatgctttgggccgaggactgccccgaagtccggcacctcgtgcacgcggatttcggctccaacaatgtcctgacggacaatggccgcataacagcggtcattgactggagcgaggcgatgttcggggattcccaatacgaggtcgccaacatcttcttctggaggccgtggttggcttgtatggagcagcagacgcgctacttcgagcggaggcatccggagcttgcaggatcgccgcggctccgggcgtatatgctccgcattggtcttgaccaactctatcagagcttggttgacggcaatttcgatgatgcagcttgggcgcagggtcgatgcgacgcaatcgtccgatccggagccgggactgtcgggcgtacacaaatcgcccgcagaagcgcggccgtctggaccgatggctgtgtagaagtactcgccgatagtggaaaccgacgccccagcactcgtccgagggcaaaggaatagtgaggtacagcttggatcgatccggctgctaacaaagcccgaaaggaagctgagttggctgctgccaccgctgagcaataactagcataaccccttggggcctctaaacgggtcttgaggggttttttgctgaaaggaggaactatatccggatgatcgtcgaggcctcacgtgttaacaagcttgataaactctaggcttgttgtgcagtttttgaagtataacaacagaagttcctattccgaagttcctattctctagaaagtataggaacttccaccacacaacacaatggcggccaccgcttccagaaccacccgattctcttcttcctcttcacaccccaccttccccaaacgcattactagatccaccctccctctctctcatcaaaccctcaccaaacccaaccacgctctcaaaatcaaatgttccatctccaaaccccccacggcggcgcccttcaccaaggaagcgccgaccacggagcccttcgtgtcacggttcgcctccggcgaacctcgcaagggcgcggacatccttgtggaggcgctggagaggcagggcgtgacgacggtgttcgcgtaccccggcggtgcgtcgatggagatccaccaggcgctcacgcgctccgccgccatccgcaacgtgctcccgcgccacgagcagggcggcgtcttcgccgccgaaggctacgcgcgttcctccggcctccccggcgtctgcattgccacctccggccccggcgccaccaacctcgtgagcggcctcgccgacgctttaatggacagcgtcccagtcgtcgccatcaccggccaggtcagccgccggatgatcggcaccgacgccttccaagaaaccccgatcgtggaggtgagcagatccatcacgaagcacaactacctcatcctcgacgtcgacgacatcccccgcgtcgtcgccgaggctttcttcgtcgccacctccggccgccccggtccggtcctcatcgacattcccaaagacgttcagcagcaactcgccgtgcctaattgggacgagcccgttaacctccccggttacctcgccaggctgcccaggccccccgccgaggcccaattggaacacattgtcagactcatcatggaggcccaaaagcccgttctctacgtcggcggtggcagtttgaattccagtgctgaattgaggcgctttgttgaactcactggtattcccgttgctagcactttaatgggtcttggaacttttcctattggtgatgaatattcccttcagatgctgggtatgcatggtactgtttatgctaactatgctgttgacaatagtgatttgttgcttgcctttggggtaaggtttgatgaccgtgttactgggaagcttgaggcttttgctagtagggctaagattgttcacattgatattgattctgccgagattgggaagaacaagcaggcgcacgtgtcggtttgcgcggatttgaagttggccttgaagggaattaatatgattttggaggagaaaggagtggagggtaagtttgatcttggaggttggagagaagagattaatgtgcagaaacacaagtttccattgggttacaagacattccaggacgcgatttctccgcagcatgctatcgaggttcttgatgagttgactaatggagatgctattgttagtactggggttgggcagcatcaaatgtgggctgcgcagttttacaagtacaagagaccgaggcagtggttgacctcagggggtcttggagccatgggttttggattgcctgcggctattggtgctgctgttgctaaccctggggctgttgtggttgacattgatggggatggtagtttcatcatgaatgttcaggagttggccactataagagtggagaatctcccagttaagatattgttgttgaacaatcagcatttgggtatggtggttcagtgggaggataggttctacaagtccaatagagctcacacctatcttggagatccgtctagcgagagcgagatattcccaaacatgctcaagtttgctgatgcttgtgggataccggcagcgcgagtgacgaagaaggaagagcttagagcggcaattcagagaatgttggacacccctggcccctaccttcttgatgtcattgtgccccatcaggagcatgtgttgccgatgattcccagtaatggatccttcaaggatgtgataactgagggtgatggtagaacgaggtactgattgcctagaccaaatgttccttgatgcttgttttgtacaatatatataagataatgctgtcctagttgcaggatttggcctgtggtgagcatcatagtctgtagtagttttggtagcaagacattttattttccttttatttaacttactacatgcagtagcatctatctatctctgtagtctgatatctcctgttgtctgtattgtgccgttggattttttgctgtagtgagactgaaaatgatgtgctagtaataatatttctgttagaaatctaagtagagaatctgttgaagaagtcaaaagctaatggaatcaggttacatattcaatgtttttctttttttagcggttggtagacgtgtagattcaacttctcttggagctcacctaggcaatcagtaaaatgcatattccttttttaacttgccatttatttacttttagtggaaattgtgaccaatttgttcatgtagaacggatttggaccattgcgtccacaaaacgtctcttttgctcgatcttcacaaagcgataccgaaatccagagatagttttcaaaagtcagaaatggcaaagttataaatagtaaaacagaatagatgctgtaatcgacttcaataacaagtggcatcacgtttctagttctagacccatcagctgggccatcaagcttatcgataccgtcggcgcggggtacgttagctgattaagtcagcatgcgcggccggcgtatgaactaaaatgcatgtaggtgtaagagctcatggagagcatggaatattgtatccgaccatgtaacagtataataactgagctccatctcacttcttctatgaataaacaaaggatgttatgatatattaacactctatctatgcaccttattgttctatgataaatttcctcttattattataaatcatctgaatcgtgacggcttatggaatgcttcaaatagtacaaaaacaaatgtgtactataagactttctaaacaattctaaccttagcattgtgaacgagacataagtgttaagaagacataacaattataatggaagaagtttgtctccatttatatattatatattacccacttatgtattatattaggatgttaaggagacataacaattataaagagagaagtttgtatccatttatatattatatactacccatttatatattatacttatccacttatttaatgtctttataaggtttgatccatgatatttctaatattttagttgatatgtatatgaaaaggtactatttgaactctcttactctgtataaaggttggatcatccttaaagtgggtctatttaattttattgcttcttacagataaaaaaaaaattatgagttggtttgataaaatattgaaggatttaaaataataataaataacatataatatatgtatataaatttattataatataacatttatctataaaaaagtaaatattgtcataaatctatacaatcgtttagccttgctggaacgaatctcaattatttaaacgagagtaaacatatttgactttttggttatttaacaaattattatttaacactatatgaaatttttttttttatcagcaaagaataaaattaaattaagaaggacaatggtgtcccaatccttatacaaccaacttccacaagaaagtcaagtcagagacaacaaaaaaacaagcaaaggaaattttttaatttgagttgtcttgtttgctgcataatttatgcagtaaaacactacacataacccttttagcagtagagcaatggttgaccgtgtgcttagcttcttttattttatttttttatcagcaaagaataaataaaataaaatgagacacttcagggatgtttcaacaggtacccatcacttaagtggcgcgccgtcgacggatccgtacgctagcctaagtacgtactcaaaatgccaacaaataaaaaaaaagttgctttaataatgccaaaacaaattaataaaacacttacaacaccggattttttttaattaaaatgtgccatttaggataaatagttaatatttttaataattatttaaaaagccgtatctactaaaatgatttttatttggttgaaaatattaatatgtttaaatcaacacaatctatcaaaattaaactaaaaaaaaaataagtgtacgtggttaacattagtacagtaatataagaggaaaatgagaaattaagaaattgaaagcgagtctaatttttaaattatgaacctgcatatataaaaggaaagaaagaatccaggaagaaaagaaatgaaaccatgcatggtcccctcgtcatcacgagtttctgccatttgcaatagaaacactgaaacacctttctctttgtcacttaattgagatgccgaagccacctcacaccatgaacttcatgaggtgtagcacccaaggcttccatagccatgcatactgaagaatgtctcaagctcagcaccctacttctgtgacgtgtccctcattcaccttcctctcttccctataaataaccacgcctcaggttctccgcttcacaactcaaacattctctccattggtccttaaacactcatcagtcatcaccgcggccgcaccatggcgatttccgatgagcctgaaagtgtagccactgctctcaaccactcttccctgcgccgccgtccctccgccacctccaccgccggcctcttcaattcgcctgagacaaccaccgacagttccggtgatgacttggccaaggattctggttccgacgactccatcaacaacgacgacgccgccgtcaattcccaacagcaaaacgaaaaacaagacactgatttctccgtcctcaaattcgcctaccgtccttccgtccccgctcaccgcaaagtgaaggaaagtccgctcagctccgacactattttccgtcagagtcacgcgggcctcttcaacctttgtatagtagtccttgttgctgtgaatagccgactcatcattgagaatttaatgaagtatggttggttgatcaaatctggcttttggtttagtgcaaagtcattgagagactggccccttttcatgtgttgtctttctcttgtggtatttcctttcgctgcctttatggtggagaagttggcacaacggaagtgtatacccgaaccagttgttgttgtacttcatataatcattacctcaacttcgcttttctatccagttttagttattctcaagtgtgattctgcttttgtatcaggtgtcacgttaatgctgttttcttgtgttgtatggttaaaattggtgtcttttgcacatacaaactatgatatgagagcacttaccaaattagttgaaaagggagaagcactgctcgatactctgaacatggagtatccttacaacgtaaccttcaagagcttggcatatttcctgcttgcccctacattatgttaccagccaagctatcctcgcacaccttatattcgaaagggttggttgtttcgccaacttgtcaagctgatagtatttacaggagttatgggatttataatagaacaatatattaatcccatagtacaaaattcacagcatcctctcaagggaaaccttctttacgccaccgagagagttctgaagctttctgttccaaatttatatgtgtggctctgcatgttctattgctttttccacctttggttaaatatcgtggcagagcttcttcgatttggtgatcgtgaattctacaaggattggtggaatgccaaaactgtcgaagattattggaggatgtggaatatgcctgttcacaaatggatgatccgccacctatattttccatgtttaaggcacggtctaccaaaggctgctgctcttttaatttccttcctggtttctgctttattccatgagctgtgcattgctgttccttgccacatgttcaagttgtgggctttcggtggaattatgtttcaggttcctttggtcttgatcactaattatctgcaaaataaattcaaaaactcaatggttggaaatatgattttttggttcatattcagtatcgttggtcaacctatgtgtgtactgctatactaccatgacttgatgaataggaaaggcaaacttgactgagcggccgcatttcgcaccaaatcaatgaaagtaataatgaaaagtctgaataagaatacttaggcttagatgcctttgttacttgtgtaaaataacttgagtcatgtacctttggcggaaacagaataaataaaaggtgaaattccaatgctctatgtataagttagtaatacttaatgtgttctacggttgtttcaatatcatcaaactctaattgaaactttagaaccacaaatctcaatcttttcttaatgaaatgaaaaatcttaattgtaccatgtttatgttaaacaccttacaattggttggagaggaggaccaaccgatgggacaacattgggagaaagagattcaatggagatttggataggagaacaacattctttttcacttcaatacaagatgagtgcaacactaaggatatgtatgagactttcagaagctacgacaacatagatgagtgaggtggtgattcctagcaagaaagacattagaggaagccaaaatcgaacaaggaagacatcaagggcaagagacaggaccatccatctcaggaaaaggagctttgggatagtccgagaagttgtacaagaaattttttggagggtgagtgatgcattgctggtgactttaactcaatcaaaattgagaaagaaagaaaagggagggggctcacatgtgaatagaagggaaacgggagaattttacagttttgatctaatgggcatcccagctagtggtaacatattcaccatgtttaaccttcacgtacgtctttccacaatacataactattaattaatcttaaataaataaaggataaaatatttttttttcttcataaagttaaaatatgttattttttgtttagatgtatattcgaataaatctaaatatatgataatgattttttatattgattaaacatataatcaatattaaatatgatatttttttatataggttgtacacataattttataaggataaaaaatatgataaaaataaattttaaatatttttatatttacgagaaaaaaaaatattttagccataaataaatgaccagcatattttacaaccttagtaattcataaattcctatatgtatatttgaaattaaaaacagataatcgttaagggaaggaatcctacgtcatctcttgccatttgtttttcatgcaaacagaaagggacgaaaaaccacctcaccatgaatcactcttcacaccatttttactagcaaacaagtctcaacaactgaagccagctctctttccgtttctttttacaacactttctttgaaatagtagtattttttttcacatgatttattaacgtgccaaaagatgcttattgaatagagtgcacatttgtaatgtactactaattagaacatgaaaaagcattgttctaacacgataatcctgtgaaggcgttaactccaaagatccaatttcactatataaattgtgacgaaagcaaaatgaattcacatagctgagagagaaaggaaaggttaactaagaagcaatacttcagcggccgcgcgagaaactttgtatgggcatggttatttctcacttctcaccctcctttactttcttatgctaaatcctccttcccctatatctccaccctcaacccctttttctcattataacttttggtgcctagatggtgtgtgtgtgtgcgcgcgagagatctgagctcaattttcctctctcaagtcctggtcatgctttgagggaaaagggttgaggaacttatgcatcttatatctctccacctccaggattttaagccctagttactcaacccttttccctcagaatatggcaattcaggcttttaattgctttcatttggtaccatcacttgcaagatttcagagtacaaggtgaacacacacatcttcctcttcatcaattctctagtttcatccttatcttttcattcacggtaactctcactaccctctttcatcttataagttataccgggggtgtgatgttgatgagtgtaaattaaatatatgtgatctctttctctggaaaaattttcagtgtgatatacataataatctcttaatctagagattttatggctttgttatatataagcggcgcaagggcgaattctgcagatatccatcacacttgggccgcttctagctagctagggtttgggtagtgagtgtaataaagttgcaaagtttttggttaggttacgttttgaccttattattatagttcaaagggaaacattaattaaaggggattatgaaggtggatgatgcctgattggattgaggatcttactgggtgaattgagctgcttagctatggatcccacagttctacccatcaataagtgcttttgtggtagtcttgtggcttccatatctggggagcttcatttgcctttatagtattaaccttcttccaatccagcatcatccaccacccttctcttcttttctctcataataatttaaatttgttatagactctaaactttaaatgttttttttgaagtttttccgtttttctcttttgccatgatcccgttcttgctgtggagtaaccttgtccgaggtatgtgcatgattagatccatacttaatttgtgtgcatcacgaaggtgaggttgaaatgaactttgcttttttgaccttttaggaaagttcttttgttgcagtaatcaattttaattagttttaattgacactattacttttattgtcatctttgttagttttattgttgaattgagtgcatatttcctaggaaattctcttacctaacattttttatacagatctatgctcttggctcttgcccttactcttggccttgtgttggttatttgtctacatatttattgactggtcgatgagacatgtcacaattcttgggcttatttgttggtctaataaaaggagtgcttattgaaagatcaagacggagattcggttttatataaataaactaaagatgacatattagtgtgttgatgtctcttcaggataatttttgtttgaaataatatggtaatgtcttgtctaaatttgtgtacataattcttactgatttttggattgttggatttttataaacaaatctggggccgcttctagctagctagggtttgggtagtgagtgtaataaagttgcaaagtttttggttaggttacgttttgaccttattattatagttcaaagggaaacattaattaaaggggattatgaagtgggctctcttgattcttggatgaggatcttactgggtgaattgagctgcttagctatggatcccacagttctacccatcaataagtgcttttgtggtagtcttgtggcttccatatctggggagcttcatttgcctttatagtattaaccttctccaagaacaaagagagcccacacccttctcttcttttctctcataataatttaaatttgttatagactctaaactttaaatgttttttttgaagtttttccgtttttctcttttgccatgatcccgttcttgctgtggagtaaccttgtccgaggtatgtgcatgattagatccatacttaatttgtgtgcatcacgaaggtgaggttgaaatgaactttgcttttttgaccttttaggaaagttcttttgttgcagtaatcaattttaattagttttaattgacactattacttttattgtcatctttgttagttttattgttgaattgagtgcatatttcctaggaaattctcttacctaacattttttatacagatctatgctcttggctcttgcccttactcttggccttgtgttggttatttgtctacatatttattgactggtcgatgagacatgtcacaattcttgggcttatttgttggtctaataaaaggagtgcttattgaaagatcaagacggagattcggttttatataaataaactaaagatgacatattagtgtgttgatgtctcttcaggataatttttgtttgaaataatatggtaatgtcttgtctaaatttgtgtacataattcttactgattttttggattgttggatttttataaacaaatctggggcccaagcggccgcatgagccgtaaaggttcaatacaacgagtgcttgttttcttagggacaagcattgtacttatgtatgattctgtgtaaccatgagtcttccacgttgtactaatgtgaagggcaaaaataaaacacagaacaagttcgtttttctcaaataatgtgaaggtagaaaatggaaccatgcctcctctcttgcatgtgatttaaaatattagcagatggtacgtcgagtcgacctgcaggtcgactcgacgtacgtcctcgaagagaagggttaataacacattttttaacatttttaacacaaattttagttatttaaaaatttattaaaaaatttaaaataagaagaggaactctttaaataaatctaacttacaaaatttatgatttttaataagttttcaccaataaaaaatgtcataaaaatatgttaaaaagtatattatcaatattctctttatgataaataaaaagaaaaaaaaaataaaagttaagtgaaaatgagattgaagtgactttaggtgtgtataaatatatcaaccccgccaacaatttatttaatccaaatatattgaagtatattattccatagcctttatttatttatatatttattatataaaagctttatttgttctaggttgttcatgaaatatttttttggttttatctccgttgtaagaaaatcatgtgctttgtgtcgccactcactattgcagctttttcatgcattggtcagattgacggttgattgtatttttgttttttatggttttgtgttatgacttaagtcttcatctctttatctcttcatcaggtttgatggttacctaatatggtccatgggtacatgcatggttaaattaggtggccaactttgttgtgaacgatagaattttttttatattaagtaaactatttttatattatgaaataataataaaaaaaatattttatcattattaacaaaatcatattagttaatttgttaactctataataaaagaaatactgtaacattcacattacatggtaacatctttccaccctttcatttgttttttgtttgatgactttttttcttgtttaaatttatttcccttcttttaaatttggaatacattatcatcatatataaactaaaatactaaaaacaggattacacaaatgataaataataacacaaatatttataaatctagctgcaatatatttaaactagctatatcgatattgtaaaataaaactagctgcattgatactgataaaaaaatatcatgtgctttctggactgatgatgcagtatacttttgacattgcctttattttatttttcagaaaagctttcttagttctgggttcttcattatttgtttcccatctccattgtgaattgaatcatttgcttcgtgtcacaaatacaatttagntaggtacatgcattggtcagattcacggtttattatgtcatgacttaagttcatggtagtacattacctgccacgcatgcattatattggttagatttgataggcaaatttggttgtcaacaatataaatataaataatgtttttatattacgaaataacagtgatcaaaacaaacagttttatctttattaacaagattttgtttttgtttgatgacgttttttaatgtttacgctttcccccttcttttgaatttagaacactttatcatcataaaatcaaatactaaaaaaattacatatttcataaataataacacaaatatttttaaaaaatctgaaataataatgaacaatattacatattatcacgaaaattcattaataaaaatattatataaataaaatgtaatagtagttatatgtaggaaaaaagtactgcacgcataatatatacaaaaagattaaaatgaactattataaataataacactaaattaatggtgaatcatatcaaaataatgaaaaagtaaataaaatttgtaattaacttctatatgtattacacacacaaataataaataatagtaaaaaaaattatgataaatatttaccatctcataagatatttaaaataatgataaaaatatagattattttttatgcaactagctagccaaaaagagaacacgggtatatataaaaagagtacctttaaattctactgtacttcctttattcctgacgtttttatatcaagtggacatacgtgaagattttaattatcagtctaaatatttcattagcacttaatacttttctgttttattcctatcctataagtagtcccgattctcccaacattgcttattcacacaactaactaagaaagtcttccatagccccccaagcggccgctagtcgactaagtcatcaactattccaagctacgtatttgggagtttgtggagtacagcaagatgatatacctagacggtgatatccaagtttttgacaacattgaccacttgtttgacttgcctgataactacttctatgcggtgatggactgtttctgtgagccaacttggggccacactaaacaatatcagatcggttactgccagcagtgcccccataaggttcagtggcccactcactttgggcccaaacctcctctctatttcaatgctggcatgtttgtgtatgagcccaatttggctacttaccgtgacctccttcaaacagtccaagtcacccagcccacttcctttgctgaacaggattttttgaacatgtacttcaaggacaaatataggccaattcctaatgtctacaatcttgtgctggccatgctgtggcgtcaccctgagaacgttgagcttgacaaagttaaagtggttcactactgtgctgctgggtctaagccttggaggtacactgggaagtgactcgaggtcatcaattactccaagctacgtatttgggagttcgtggagtacaagaagacgatatacctagacggtgacatccaagtatttggaaacatagaccacttgtttgatctgcctgataattatttctatgcggtgatggattgtttctgcgagaagacttggagccacacccctcagttccagattgggtactgccaacagtgccctgataaggttcaatggccctctcactttggttccaaacctcctctatatttcaatgctggcatgtttgtttatgagcctaatctcgacacctaccgtgatcttctccaaactgtccaactcaccaagcccacttcttttgctgagcaggactttctcaacatgtacttcaaggacaagtacaagccaataccgaacatgtacaaccttgtgctggccatgttgtggcgtcaccctgaaaatgttgaacttgataaagttcaagtggttcattactgtgctgctgggtctaagccttggaggttcactgggaagtaactgcaggtcatcaactactccaagctccgtatatgggagtttgtggagtacagcaagatgatatacttggacggagacattgaggtatatgagaacatagaccacctatttgacctacctgatggtaacttttacgctgtgatggattgtttctgcgagaagacatggagtcacacccctcagtacaaggtgggttactgccagcaatgcccggagaaggtgcggtggcccaccgaattgggtcagcccccttctctttacttcaacgctggcatgttcgtgttcgaacccaacatcgccacctatcatgacctattgaaaacggtgcaagtcaccactcccacctcgttcgctgaacaagatttcttgaacatgtacttcaaggacatttacaagccaatccctttaaattacaatcttgtcctcgccatgctgtggcgccacccggaaaacgttaaattagaccaagtcaaggttgttcactattgcgcagcggggtccaagccatggagatatacggggaagtagcctaggcgtacgcaggtaagtttctgcttctacctttgatatatatataataattatcattaattagtagtaatataatatttcaaatatttttttcaaaataaaagaatgtagtatatagcaattgcttttctgtagtttataagtgtgtatattttaatttataacttttctaatatatgaccaaaacatggtgatgtgcaggtcctaggctacttccccgtatatctccatggcttggaccccgctgcgcaatagtgaacaaccttgacttggtctaatttaacgttttccgggtggcgccacagcatggcgaggacaagattgtaatttaaagggattggcttgtaaatgtccttgaagtacatgttcaagaaatcttgttcagcgaacgaggtgggagtggtgacttgcaccgttttcaataggtcatgataggtggcgatgttgggttcgaacacgaacatgccagcgttgaagtaaagagaagggggctgacccaattcggtgggccaccgcaccttctccgggcattgctggcagtaacccaccttgtactgaggggtgtgactccatgtcttctcgcagaaacaatccatcacagcgtaaaagttaccatcaggtaggtcaaataggtggtctatgttctcatatacctcaatgtctccgtccaagtatatcatcttgctgtactccacaaactcccatatacggagcttggagtagttgatgacctgcagttacttcccagtgaacctccaaggcttagacccagcagcacagtaatgaaccacttgaactttatcaagttcaacattttcagggtgacgccacaacatggccagcacaaggttgtacatgttcggtattggcttgtacttgtccttgaagtacatgttgagaaagtcctgctcagcaaaagaagtgggcttggtgagttggacagtttggagaagatcacggtaggtgtcgagattaggctcataaacaaacatgccagcattgaaatatagaggaggtttggaaccaaagtgagagggccattgaaccttatcagggcactgttggcagtacccaatctggaactgaggggtgtggctccaagtcttctcgcagaaacaatccatcaccgcatagaaataattatcaggcagatcaaacaagtggtctatgtttccaaatacttggatgtcaccgtctaggtatatcgtcttcttgtactccacgaactcccaaatacgtagcttggagtaattgatgacctcgagtcacttcccagtgtacctccaaggcttagacccagcagcacagtagtgaaccactttaactttgtcaagctcaacgttctcagggtgacgccacagcatggccagcacaagattgtagacattaggaattggcctatatttgtccttgaagtacatgttcaaaaaatcctgttcagcaaaggaagtgggctgggtgacttggactgtttgaaggaggtcacggtaagtagccaaattgggctcatacacaaacatgccagcattgaaatagagaggaggtttgggcccaaagtgagtgggccactgaaccttatgggggcactgctggcagtaaccgatctgatattgtttagtgtggccccaagttggctcacagaaacagtccatcaccgcatagaagtagttatcaggcaagtcaaacaagtggtcaatgttgtcaaaaacttggatatcaccgtctaggtatatcatcttgctgtactccacaaactcccaaatacgtagcttggaatagttgatgacttagtcgactagcggccgcgacacaagtgtgagagtactaaataaatgctttggttgtacgaaatcattacactaaataaaataatcaaagcttatatatgccttccgctaaggccgaatgcaaagaaattggttctttctcgttatcttttgccacttttactagtacgtattaattactacttaatcatctttgtttacggctcattatatccggtctaggccaaggccgcgaagttaaaagcaatgttgtcacttgtacgtactaacacatgatgtgatagtttatgctagctagctataacataagctgtctctgagtgtgttgtatattaataaagatcatcactggtgaatggtgatcgtgtacgtaccctacttagtaggcaatggaagcacttagagtgtgctttgtgcatggccttgcctctgttttgagacttttgtaatgttttcgagtttaaatctttgcctttgcgtacgtgggcggatcccctgca

SEQ ID NO: 37 - DNA, 17261 bp, artificial sequence
  RMCE for Target Line A and donor DNA PHP52246
  misc_feature (12301)..(12301): n is a, c, g, or t
agatccgtcaacatggtggagcacgacactctcgtctactccaagaatatcaaagatacagtctcagaagaccaaagggctattgagacttttcaacaaagggtaatatcgggaaacctcctcggattccattgcccagctatctgtcacttcatcaaaaggacagtagaaaaggaaggtggcacctacaaatgccatcattgcgataaaggaaaggctatcgttcaagatgcctctgccgacagtggtcccaaagatggacccccacccacgaggagcatcgtggaaaaagaagacgttccaaccacgtcttcaaagcaagtggattgatgtgatgatcctatgcgtatggtatgacgtgtgttcaagatgatgacttcaaacctacctatgacgtatggtatgacgtgtgtcgactgatgacttagatccactcgagcggctataaatacgtacctacgcaccctgcgctaccatccctagagctgcagcttatttttacaacaattaccaacaacaacaaacaacaaacaacattacaattactatttacaattacagtcgacccaacagaagttcctattccgaagttcctattctctagaaagtataggaacttccaccacacaacacaatggcggccaccgcttccagaaccacccgattctcttcttcctcttcacaccccaccttccccaaacgcattactagatccaccctccctctctctcatcaaaccctcaccaaacccaaccacgctctcaaaatcaaatgttccatctccaaaccccccacggcggcgcccttcaccaaggaagcgccgaccacggagcccttcgtgtcacggttcgcctccggcgaacctcgcaagggcgcggacatccttgtggaggcgctggagaggcagggcgtgacgacggtgttcgcgtaccccggcggtgcgtcgatggagatccaccaggcgctcacgcgctccgccgccatccgcaacgtgctcccgcgccacgagcagggcggcgtcttcgccgccgaaggctacgcgcgttcctccggcctccccggcgtctgcattgccacctccggccccggcgccaccaacctcgtgagcggcctcgccgacgctttaatggacagcgtcccagtcgtcgccatcaccggccaggtcagccgccggatgatcggcaccgacgccttccaagaaaccccgatcgtggaggtgagcagatccatcacgaagcacaactacctcatcctcgacgtcgacgacatcccccgcgtcgtcgccgaggctttcttcgtcgccacctccggccgccccggtccggtcctcatcgacattcccaaagacgttcagcagcaactcgccgtgcctaattgggacgagcccgttaacctccccggttacctcgccaggctgcccaggccccccgccgaggcccaattggaacacattgtcagactcatcatggaggcccaaaagcccgttctctacgtcggcggtggcagtttgaattccagtgctgaattgaggcgctttgttgaactcactggtattcccgttgctagcactttaatgggtcttggaacttttcctattggtgatgaatattcccttcagatgctgggtatgcatggtactgtttatgctaactatgctgttgacaatagtgatttgttgcttgcctttggggtaaggtttgatgaccgtgttactgggaagcttgaggcttttgctagtagggctaagattgttcacattgatattgattctgccgagattgggaagaacaagcaggcgcacgtgtcggtttgcgcggatttgaagttggccttgaagggaattaatatgattttggaggagaaaggagtggagggtaagtttgatcttggaggttggagagaagagattaatgtgcagaaacacaagtttccattgggttacaagacattccaggacgcgatttctccgcagcatgctatcgaggttcttgatgagttgactaatggagatgctattgttagtactggggttgggcagcatcaaatgtgggctgcgcagttttacaagtacaagagaccgaggcagtggttgacctcagggggtcttggagccatgggttttggattgcctgcggctattggtgctgctgttgctaaccctggggctgttgtggttgacattgatggggatggtagtttcatcatgaatgttcaggagttggccactataagagtggagaatctcccagttaagatattgttgttgaacaatcagcatttgggtatggtggttcagtgggaggataggttctacaagtccaatagagctcacacctatcttggagatccgtctagcgagagcgagatattcccaaacatgctcaagtttgctgatgcttgtgggataccggcagcgcgagtgacgaagaaggaagagcttagagcggcaattcagagaatgttggacacccctggcccctaccttcttgatgtcattgtgccccatcaggagcatgtgttgccgatgattcccagtaatggatccttcaaggatgtgataactgagggtgatggtagaacgaggtactgattgcctagaccaaatgttccttgatgcttgttttgtacaatatatataagataatgctgtcctagttgcaggatttggcctgtggtgagcatcatagtctgtagtagttttggtagcaagacattttattttccttttatttaacttactacatgcagtagcatctatctatctctgtagtctgatatctcctgttgtctgtattgtgccgttggattttttgctgtagtgagactgaaaatgatgtgctagtaataatatttctgttagaaatctaagtagagaatctgttgaagaagtcaaaagctaatggaatcaggttacatattcaatgtttttctttttttagcggttggtagacgtgtagattcaacttctcttggagctcacctaggcaatcagtaaaatgcatattccttttttaacttgccatttatttacttttagtggaaattgtgaccaatttgttcatgtagaacggatttggaccattgcgtccacaaaacgtctcttttgctcgatcttcacaaagcgataccgaaatccagagatagttttcaaaagtcagaaatggcaaagttataaatagtaaaacagaatagatgctgtaatcgacttcaataacaagtggcatcacgtttctagttctagacccatcagctgggccatcaagcttatcgataccgtcggcgcggggtacgttagctgattaagtcagcatgcgcggccggcgtatgaactaaaatgcatgtaggtgtaagagctcatggagagcatggaatattgtatccgaccatgtaacagtataataactgagctccatctcacttcttctatgaataaacaaaggatgttatgatatattaacactctatctatgcaccttattgttctatgataaatttcctcttattattataaatcatctgaatcgtgacggcttatggaatgcttcaaatagtacaaaaacaaatgtgtactataagactttctaaacaattctaaccttagcattgtgaacgagacataagtgttaagaagacataacaattataatggaagaagtttgtctccatttatatattatatattacccacttatgtattatattaggatgttaaggagacataacaattataaagagagaagtttgtatccatttatatattatatactacccatttatatattatacttatccacttatttaatgtctttataaggtttgatccatgatatttctaatattttagttgatatgtatatgaaaaggtactatttgaactctcttactctgtataaaggttggatcatccttaaagtgggtctatttaattttattgcttcttacagataaaaaaaaaattatgagttggtttgataaaatattgaaggatttaaaataataataaataacatataatatatgtatataaatttattataatataacatttatctataaaaaagtaaatattgtcataaatctatacaatcgtttagccttgctggaacgaatctcaattatttaaacgagagtaaacatatttgactttttggttatttaacaaattattatttaacactatatgaaatttttttttttatcagcaaagaataaaattaaattaagaaggacaatggtgtcccaatccttatacaaccaacttccacaagaaagtcaagtcagagacaacaaaaaaacaagcaaaggaaattttttaatttgagttgtcttgtttgctgcataatttatgcagtaaaacactacacataacccttttagcagtagagcaatggttgaccgtgtgcttagcttcttttattttatttttttatcagcaaagaataaataaaataaaatgagacacttcagggatgtttcaacaggtacccatcacttaagtggcgcgccgtcgacggatccgtacgctagcctaagtacgtactcaaaatgccaacaaataaaaaaaaagttgctttaataatgccaaaacaaattaataaaacacttacaacaccggattttttttaattaaaatgtgccatttaggataaatagttaatatttttaataattatttaaaaagccgtatctactaaaatgatttttatttggttgaaaatattaatatgtttaaatcaacacaatctatcaaaattaaactaaaaaaaaaataagtgtacgtggttaacattagtacagtaatataagaggaaaatgagaaattaagaaattgaaagcgagtctaatttttaaattatgaacctgcatatataaaaggaaagaaagaatccaggaagaaaagaaatgaaaccatgcatggtcccctcgtcatcacgagtttctgccatttgcaatagaaacactgaaacacctttctctttgtcacttaattgagatgccgaagccacctcacaccatgaacttcatgaggtgtagcacccaaggcttccatagccatgcatactgaagaatgtctcaagctcagcaccctacttctgtgacgtgtccctcattcaccttcctctcttccctataaataaccacgcctcaggttctccgcttcacaactcaaacattctctccattggtccttaaacactcatcagtcatcaccgcggccgcatgactatcgactcacaatactacaagtcgcgagacaaaaacgacacggcacccaaaatcgcgggaatccgatatgccccgctatcgacaccattactcaaccgatgtgagaccttctctctggtctggcacattttcagcattcccactttcctcacaattttcatgctatgctgcgcaattccactgctctggccatttgtgattgcgtatgtagtgtacgctgttaaagacgactccccgtccaacggaggagtggtcaagcgatactcgcctatttcaagaaacttcttcatctggaagctctttggccgctacttccccataactctgcacaagacggtggatctggagcccacgcacacatactaccctctggacgtccaggagtatcacctgattgctgagagatactggccgcagaacaagtacctccgagcaatcatcaccaccatcgagtactttctgcccgccttcatgaaacggtctctttctatcaacgagcaggagcagcctgccgagcgagatcctctcctgtctcccgtttctcccagctctccgggttctcaacctgacaagtggattaaccacgacagcagatatagccgtggagaatcatctggctccaacggccacgcctcgggctccgaacttaacggcaacggcaacaacggcaccactaaccgacgacctttgtcgtccgcctctgctggctccactgcatctgattccacgcttcttaacgggtccctcaactcctacgccaaccagatcattggcgaaaacgacccacagctgtcgcccacaaaactcaagcccactggcagaaaatacatcttcggctaccacccccacggcattatcggcatgggagcctttggtggaattgccaccgagggagctggatggtccaagctctttccgggcatccctgtttctcttatgactctcaccaacaacttccgagtgcctctctacagagagtacctcatgagtctgggagtcgcttctgtctccaagaagtcctgcaaggccctcctcaagcgaaaccagtctatctgcattgtcgttggtggagcacaggaaagtcttctggccagacccggtgtcatggacctggtgctactcaagcgaaagggttttgttcgacttggtatggaggtcggaaatgtcgcccttgttcccatcatggcctttggtgagaacgacctctatgaccaggttagcaacgacaagtcgtccaagctgtaccgattccagcagtttgtcaagaacttccttggattcacccttcctttgatgcatgcccgaggcgtcttcaactacgatgtcggtcttgtcccctacaggcgacccgtcaacattgtggttggttcccccattgacttgccttatctcccacaccccaccgacgaagaagtgtccgaataccacgaccgatacatcgccgagctgcagcgaatctacaacgagcacaaggatgaatatttcatcgattggaccgaggagggcaaaggagccccagagttccgaatgattgagtaagcggccgcatttcgcaccaaatcaatgaaagtaataatgaaaagtctgaataagaatacttaggcttagatgcctttgttacttgtgtaaaataacttgagtcatgtacctttggcggaaacagaataaataaaaggtgaaattccaatgctctatgtataagttagtaatacttaatgtgttctacggttgtttcaatatcatcaaactctaattgaaactttagaaccacaaatctcaatcttttcttaatgaaatgaaaaatcttaattgtaccatgtttatgttaaacaccttacaattggttggagaggaggaccaaccgatgggacaacattgggagaaagagattcaatggagatttggataggagaacaacattctttttcacttcaatacaagatgagtgcaacactaaggatatgtatgagactttcagaagctacgacaacatagatgagtgaggtggtgattcctagcaagaaagacattagaggaagccaaaatcgaacaaggaagacatcaagggcaagagacaggaccatccatctcaggaaaaggagctttgggatagtccgagaagttgtacaagaaattttttggagggtgagtgatgcattgctggtgactttaactcaatcaaaattgagaaagaaagaaaagggagggggctcacatgtgaatagaagggaaacgggagaattttacagttttgatctaatgggcatcccagctagtggtaacatattcaccatgtttaaccttcacgtacgtctttccacaatacataactattaattaatcttaaataaataaaggataaaatatttttttttcttcataaagttaaaatatgttattttttgtttagatgtatattcgaataaatctaaatatatgataatgattttttatattgattaaacatataatcaatattaaatatgatatttttttatataggttgtacacataattttataaggataaaaaatatgataaaaataaattttaaatatttttatatttacgagaaaaaaaaatattttagccataaataaatgaccagcatattttacaaccttagtaattcataaattcctatatgtatatttgaaattaaaaacagataatcgttaagggaaggaatcctacgtcatctcttgccatttgtttttcatgcaaacagaaagggacgaaaaaccacctcaccatgaatcactcttcacaccatttttactagcaaacaagtctcaacaactgaagccagctctctttccgtttctttttacaacactttctttgaaatagtagtattttttttcacatgatttattaacgtgccaaaagatgcttattgaatagagtgcacatttgtaatgtactactaattagaacatgaaaaagcattgttctaacacgataatcctgtgaaggcgttaactccaaagatccaatttcactatataaattgtgacgaaagcaaaatgaattcacatagctgagagagaaaggaaaggttaactaagaagcaatacttcagcggccgcgcgagaaactttgtatgggcatggttatttctcacttctcaccctcctttactttcttatgctaaatcctccttcccctatatctccaccctcaacccctttttctcattataacttttggtgcctagatggtgtgtgtgtgtgcgcgcgagagatctgagctcaattttcctctctcaagtcctggtcatgctttgagggaaaagggttgaggaacttatgcatcttatatctctccacctccaggattttaagccctagttactcaacccttttccctcagaatatggcaattcaggcttttaattgctttcatttggtaccatcacttgcaagatttcagagtacaaggtgaacacacacatcttcctcttcatcaattctctagtttcatccttatcttttcattcacggtaactctcactaccctctttcatcttataagttataccgggggtgtgatgttgatgagtgtaaattaaatatatgtgatctctttctctggaaaaattttcagtgtgatatacataataatctcttaatctagagattttatggctttgttatatataagcggcgcaagggcgaattctgcagatatccatcacacttgggccgcttctagctagctagggtttgggtagtgagtgtaataaagttgcaaagtttttggttaggttacgttttgaccttattattatagttcaaagggaaacattaattaaaggggattatgaaggtggatgatgcctgattggattgaggatcttactgggtgaattgagctgcttagctatggatcccacagttctacccatcaataagtgcttttgtggtagtcttgtggcttccatatctggggagcttcatttgcctttatagtattaaccttcttccaatccagcatcatccaccacccttctcttcttttctctcataataatttaaatttgttatagactctaaactttaaatgttttttttgaagtttttccgtttttctcttttgccatgatcccgttcttgctgtggagtaaccttgtccgaggtatgtgcatgattagatccatacttaatttgtgtgcatcacgaaggtgaggttgaaatgaactttgcttttttgaccttttaggaaagttcttttgttgcagtaatcaattttaattagttttaattgacactattacttttattgtcatctttgttagttttattgttgaattgagtgcatatttcctaggaaattctcttacctaacattttttatacagatctatgctcttggctcttgcccttactcttggccttgtgttggttatttgtctacatatttattgactggtcgatgagacatgtcacaattcttgggcttatttgttggtctaataaaaggagtgcttattgaaagatcaagacggagattcggttttatataaataaactaaagatgacatattagtgtgttgatgtctcttcaggataatttttgtttgaaataatatggtaatgtcttgtctaaatttgtgtacataattcttactgatttttggattgttggatttttataaacaaatctggggccgcttctagctagctagggtttgggtagtgagtgtaataaagttgcaaagtttttggttaggttacgttttgaccttattattatagttcaaagggaaacattaattaaaggggattatgaagtgggctctcttgattcttggatgaggatcttactgggtgaattgagctgcttagctatggatcccacagttctacccatcaataagtgcttttgtggtagtcttgtggcttccatatctggggagcttcatttgcctttatagtattaaccttctccaagaacaaagagagcccacacccttctcttcttttctctcataataatttaaatttgttatagactctaaactttaaatgttttttttgaagtttttccgtttttctcttttgccatgatcccgttcttgctgtggagtaaccttgtccgaggtatgtgcatgattagatccatacttaatttgtgtgcatcacgaaggtgaggttgaaatgaactttgcttttttgaccttttaggaaagttcttttgttgcagtaatcaattttaattagttttaattgacactattacttttattgtcatctttgttagttttattgttgaattgagtgcatatttcctaggaaattctcttacctaacattttttatacagatctatgctcttggctcttgcccttactcttggccttgtgttggttatttgtctacatatttattgactggtcgatgagacatgtcacaattcttgggcttatttgttggtctaataaaaggagtgcttattgaaagatcaagacggagattcggttttatataaataaactaaagatgacatattagtgtgttgatgtctcttcaggataatttttgtttgaaataatatggtaatgtcttgtctaaatttgtgtacataattcttactgattttttggattgttggatttttataaacaaatctggggcccaagcggccgcatgagccgtaaaggttcaatacaacgagtgcttgttttcttagggacaagcattgtacttatgtatgattctgtgtaaccatgagtcttccacgttgtactaatgtgaagggcaaaaataaaacacagaacaagttcgtttttctcaaataatgtgaaggtagaaaatggaaccatgcctcctctcttgcatgtgatttaaaatattagcagatggtacgtcgagtcgacctgcaggtcgactcgacgtacgtcctcgaagagaagggttaataacacattttttaacatttttaacacaaattttagttatttaaaaatttattaaaaaatttaaaataagaagaggaactctttaaataaatctaacttacaaaatttatgatttttaataagttttcaccaataaaaaatgtcataaaaatatgttaaaaagtatattatcaatattctctttatgataaataaaaagaaaaaaaaaataaaagttaagtgaaaatgagattgaagtgactttaggtgtgtataaatatatcaaccccgccaacaatttatttaatccaaatatattgaagtatattattccatagcctttatttatttatatatttattatataaaagctttatttgttctaggttgttcatgaaatatttttttggttttatctccgttgtaagaaaatcatgtgctttgtgtcgccactcactattgcagctttttcatgcattggtcagattgacggttgattgtatttttgttttttatggttttgtgttatgacttaagtcttcatctctttatctcttcatcaggtttgatggttacctaatatggtccatgggtacatgcatggttaaattaggtggccaactttgttgtgaacgatagaattttttttatattaagtaaactatttttatattatgaaataataataaaaaaaatattttatcattattaacaaaatcatattagttaatttgttaactctataataaaagaaatactgtaacattcacattacatggtaacatctttccaccctttcatttgttttttgtttgatgactttttttcttgtttaaatttatttcccttcttttaaatttggaatacattatcatcatatataaactaaaatactaaaaacaggattacacaaatgataaataataacacaaatatttataaatctagctgcaatatatttaaactagctatatcgatattgtaaaataaaactagctgcattgatactgataaaaaaatatcatgtgctttctggactgatgatgcagtatacttttgacattgcctttattttatttttcagaaaagctttcttagttctgggttcttcattatttgtttcccatctccattgtgaattgaatcatttgcttcgtgtcacaaatacaatttagntaggtacatgcattggtcagattcacggtttattatgtcatgacttaagttcatggtagtacattacctgccacgcatgcattatattggttagatttgataggcaaatttggttgtcaacaatataaatataaataatgtttttatattacgaaataacagtgatcaaaacaaacagttttatctttattaacaagattttgtttttgtttgatgacgttttttaatgtttacgctttcccccttcttttgaatttagaacactttatcatcataaaatcaaatactaaaaaaattacatatttcataaataataacacaaatatttttaaaaaatctgaaataataatgaacaatattacatattatcacgaaaattcattaataaaaatattatataaataaaatgtaatagtagttatatgtaggaaaaaagtactgcacgcataatatatacaaaaagattaaaatgaactattataaataataacactaaattaatggtgaatcatatcaaaataatgaaaaagtaaataaaatttgtaattaacttctatatgtattacacacacaaataataaataatagtaaaaaaaattatgataaatatttaccatctcataagatatttaaaataatgataaaaatatagattattttttatgcaactagctagccaaaaagagaacacgggtatatataaaaagagtacctttaaattctactgtacttcctttattcctgacgtttttatatcaagtggacatacgtgaagattttaattatcagtctaaatatttcattagcacttaatacttttctgttttattcctatcctataagtagtcccgattctcccaacattgcttattcacacaactaactaagaaagtcttccatagccccccaagcggccgctagtcgactaagtcatcaactattccaagctacgtatttgggagtttgtggagtacagcaagatgatatacctagacggtgatatccaagtttttgacaacattgaccacttgtttgacttgcctgataactacttctatgcggtgatggactgtttctgtgagccaacttggggccacactaaacaatatcagatcggttactgccagcagtgcccccataaggttcagtggcccactcactttgggcccaaacctcctctctatttcaatgctggcatgtttgtgtatgagcccaatttggctacttaccgtgacctccttcaaacagtccaagtcacccagcccacttcctttgctgaacaggattttttgaacatgtacttcaaggacaaatataggccaattcctaatgtctacaatcttgtgctggccatgctgtggcgtcaccctgagaacgttgagcttgacaaagttaaagtggttcactactgtgctgctgggtctaagccttggaggtacactgggaagtgactcgaggtcatcaattactccaagctacgtatttgggagttcgtggagtacaagaagacgatatacctagacggtgacatccaagtatttggaaacatagaccacttgtttgatctgcctgataattatttctatgcggtgatggattgtttctgcgagaagacttggagccacacccctcagttccagattgggtactgccaacagtgccctgataaggttcaatggccctctcactttggttccaaacctcctctatatttcaatgctggcatgtttgtttatgagcctaatctcgacacctaccgtgatcttctccaaactgtccaactcaccaagcccacttcttttgctgagcaggactttctcaacatgtacttcaaggacaagtacaagccaataccgaacatgtacaaccttgtgctggccatgttgtggcgtcaccctgaaaatgttgaacttgataaagttcaagtggttcattactgtgctgctgggtctaagccttggaggttcactgggaagtaactgcaggtcatcaactactccaagctccgtatatgggagtttgtggagtacagcaagatgatatacttggacggagacattgaggtatatgagaacatagaccacctatttgacctacctgatggtaacttttacgctgtgatggattgtttctgcgagaagacatggagtcacacccctcagtacaaggtgggttactgccagcaatgcccggagaaggtgcggtggcccaccgaattgggtcagcccccttctctttacttcaacgctggcatgttcgtgttcgaacccaacatcgccacctatcatgacctattgaaaacggtgcaagtcaccactcccacctcgttcgctgaacaagatttcttgaacatgtacttcaaggacatttacaagccaatccctttaaattacaatcttgtcctcgccatgctgtggcgccacccggaaaacgttaaattagaccaagtcaaggttgttcactattgcgcagcggggtccaagccatggagatatacggggaagtagcctaggcgtacgcaggtaagtttctgcttctacctttgatatatatataataattatcattaattagtagtaatataatatttcaaatatttttttcaaaataaaagaatgtagtatatagcaattgcttttctgtagtttataagtgtgtatattttaatttataacttttctaatatatgaccaaaacatggtgatgtgcaggtcctaggctacttccccgtatatctccatggcttggaccccgctgcgcaatagtgaacaaccttgacttggtctaatttaacgttttccgggtggcgccacagcatggcgaggacaagattgtaatttaaagggattggcttgtaaatgtccttgaagtacatgttcaagaaatcttgttcagcgaacgaggtgggagtggtgacttgcaccgttttcaataggtcatgataggtggcgatgttgggttcgaacacgaacatgccagcgttgaagtaaagagaagggggctgacccaattcggtgggccaccgcaccttctccgggcattgctggcagtaacccaccttgtactgaggggtgtgactccatgtcttctcgcagaaacaatccatcacagcgtaaaagttaccatcaggtaggtcaaataggtggtctatgttctcatatacctcaatgtctccgtccaagtatatcatcttgctgtactccacaaactcccatatacggagcttggagtagttgatgacctgcagttacttcccagtgaacctccaaggcttagacccagcagcacagtaatgaaccacttgaactttatcaagttcaacattttcagggtgacgccacaacatggccagcacaaggttgtacatgttcggtattggcttgtacttgtccttgaagtacatgttgagaaagtcctgctcagcaaaagaagtgggcttggtgagttggacagtttggagaagatcacggtaggtgtcgagattaggctcataaacaaacatgccagcattgaaatatagaggaggtttggaaccaaagtgagagggccattgaaccttatcagggcactgttggcagtacccaatctggaactgaggggtgtggctccaagtcttctcgcagaaacaatccatcaccgcatagaaataattatcaggcagatcaaacaagtggtctatgtttccaaatacttggatgtcaccgtctaggtatatcgtcttcttgtactccacgaactcccaaatacgtagcttggagtaattgatgacctcgagtcacttcccagtgtacctccaaggcttagacccagcagcacagtagtgaaccactttaactttgtcaagctcaacgttctcagggtgacgccacagcatggccagcacaagattgtagacattaggaattggcctatatttgtccttgaagtacatgttcaaaaaatcctgttcagcaaaggaagtgggctgggtgacttggactgtttgaaggaggtcacggtaagtagccaaattgggctcatacacaaacatgccagcattgaaatagagaggaggtttgggcccaaagtgagtgggccactgaaccttatgggggcactgctggcagtaaccgatctgatattgtttagtgtggccccaagttggctcacagaaacagtccatcaccgcatagaagtagttatcaggcaagtcaaacaagtggtcaatgttgtcaaaaacttggatatcaccgtctaggtatatcatcttgctgtactccacaaactcccaaatacgtagcttggaatagttgatgacttagtcgactagcggccgcgacacaagtgtgagagtactaaataaatgctttggttgtacgaaatcattacactaaataaaataatcaaagcttatatatgccttccgctaaggccgaatgcaaagaaattggttctttctcgttatcttttgccacttttactagtacgtattaattactacttaatcatctttgtttacggctcattatatccggtctaggccaaggccgcgaagttaaaagcaatgttgtcacttgtacgtactaacacatgatgtgatagtttatgctagctagctataacataagctgtctctgagtgtgttgtatattaataaagatcatcactggtgaatggtgatcgtgtacgtaccctacttagtaggcaatggaagcacttagagtgtgctttgtgcatggccttgcctctgttttgagacttttgtaatgttttcgagtttaaatctttgcctttgcgtacgtgggcggatcccctgcaggagatccaagcttggcgcgccggaattaattaggtaatttcacgcgccggatccttaattaagtctagagtcgactgtttaattctagtggccggcccagctgatgatcccggtgaagttcctattccgaagttcctattctccagaaagtataggaacttc

SEQ ID NO: 38 - DNA, 17234 bp, artificial sequence
  RMCE for Target Line A and donor DNA PHP52247
  misc_feature (12274)..(12274): n is a, c, g, or t
agatccgtcaacatggtggagcacgacactctcgtctactccaagaatatcaaagatacagtctcagaagaccaaagggctattgagacttttcaacaaagggtaatatcgggaaacctcctcggattccattgcccagctatctgtcacttcatcaaaaggacagtagaaaaggaaggtggcacctacaaatgccatcattgcgataaaggaaaggctatcgttcaagatgcctctgccgacagtggtcccaaagatggacccccacccacgaggagcatcgtggaaaaagaagacgttccaaccacgtcttcaaagcaagtggattgatgtgatgatcctatgcgtatggtatgacgtgtgttcaagatgatgacttcaaacctacctatgacgtatggtatgacgtgtgtcgactgatgacttagatccactcgagcggctataaatacgtacctacgcaccctgcgctaccatccctagagctgcagcttatttttacaacaattaccaacaacaacaaacaacaaacaacattacaattactatttacaattacagtcgacccaacagaagttcctattccgaagttcctattctctagaaagtataggaacttccaccacacaacacaatggcggccaccgcttccagaaccacccgattctcttcttcctcttcacaccccaccttccccaaacgcattactagatccaccctccctctctctcatcaaaccctcaccaaacccaaccacgctctcaaaatcaaatgttccatctccaaaccccccacggcggcgcccttcaccaaggaagcgccgaccacggagcccttcgtgtcacggttcgcctccggcgaacctcgcaagggcgcggacatccttgtggaggcgctggagaggcagggcgtgacgacggtgttcgcgtaccccggcggtgcgtcgatggagatccaccaggcgctcacgcgctccgccgccatccgcaacgtgctcccgcgccacgagcagggcggcgtcttcgccgccgaaggctacgcgcgttcctccggcctccccggcgtctgcattgccacctccggccccggcgccaccaacctcgtgagcggcctcgccgacgctttaatggacagcgtcccagtcgtcgccatcaccggccaggtcagccgccggatgatcggcaccgacgccttccaagaaaccccgatcgtggaggtgagcagatccatcacgaagcacaactacctcatcctcgacgtcgacgacatcccccgcgtcgtcgccgaggctttcttcgtcgccacctccggccgccccggtccggtcctcatcgacattcccaaagacgttcagcagcaactcgccgtgcctaattgggacgagcccgttaacctccccggttacctcgccaggctgcccaggccccccgccgaggcccaattggaacacattgtcagactcatcatggaggcccaaaagcccgttctctacgtcggcggtggcagtttgaattccagtgctgaattgaggcgctttgttgaactcactggtattcccgttgctagcactttaatgggtcttggaacttttcctattggtgatgaatattcccttcagatgctgggtatgcatggtactgtttatgctaactatgctgttgacaatagtgatttgttgcttgcctttggggtaaggtttgatgaccgtgttactgggaagcttgaggcttttgctagtagggctaagattgttcacattgatattgattctgccgagattgggaagaacaagcaggcgcacgtgtcggtttgcgcggatttgaagttggccttgaagggaattaatatgattttggaggagaaaggagtggagggtaagtttgatcttggaggttggagagaagagattaatgtgcagaaacacaagtttccattgggttacaagacattccaggacgcgatttctccgcagcatgctatcgaggttcttgatgagttgactaatggagatgctattgttagtactggggttgggcagcatcaaatgtgggctgcgcagttttacaagtacaagagaccgaggcagtggttgacctcagggggtcttggagccatgggttttggattgcctgcggctattggtgctgctgttgctaaccctggggctgttgtggttgacattgatggggatggtagtttcatcatgaatgttcaggagttggccactataagagtggagaatctcccagttaagatattgttgttgaacaatcagcatttgggtatggtggttcagtgggaggataggttctacaagtccaatagagctcacacctatcttggagatccgtctagcgagagcgagatattcccaaacatgctcaagtttgctgatgcttgtgggataccggcagcgcgagtgacgaagaaggaagagcttagagcggcaattcagagaatgttggacacccctggcccctaccttcttgatgtcattgtgccccatcaggagcatgtgttgccgatgattcccagtaatggatccttcaaggatgtgataactgagggtgatggtagaacgaggtactgattgcctagaccaaatgttccttgatgcttgttttgtacaatatatataagataatgctgtcctagttgcaggatttggcctgtggtgagcatcatagtctgtagtagttttggtagcaagacattttattttccttttatttaacttactacatgcagtagcatctatctatctctgtagtctgatatctcctgttgtctgtattgtgccgttggattttttgctgtagtgagactgaaaatgatgtgctagtaataatatttctgttagaaatctaagtagagaatctgttgaagaagtcaaaagctaatggaatcaggttacatattcaatgtttttctttttttagcggttggtagacgtgtagattcaacttctcttggagctcacctaggcaatcagtaaaatgcatattccttttttaacttgccatttatttacttttagtggaaattgtgaccaatttgttcatgtagaacggatttggaccattgcgtccacaaaacgtctcttttgctcgatcttcacaaagcgataccgaaatccagagatagttttcaaaagtcagaaatggcaaagttataaatagtaaaacagaatagatgctgtaatcgacttcaataacaagtggcatcacgtttctagttctagacccatcagctgggccatcaagcttatcgataccgtcggcgcggggtacgttagctgattaagtcagcatgcgcggccggcgtatgaactaaaatgcatgtaggtgtaagagctcatggagagcatggaatattgtatccgaccatgtaacagtataataactgagctccatctcacttcttctatgaataaacaaaggatgttatgatatattaacactctatctatgcaccttattgttctatgataaatttcctcttattattataaatcatctgaatcgtgacggcttatggaatgcttcaaatagtacaaaaacaaatgtgtactataagactttctaaacaattctaaccttagcattgtgaacgagacataagtgttaagaagacataacaattataatggaagaagtttgtctccatttatatattatatattacccacttatgtattatattaggatgttaaggagacataacaattataaagagagaagtttgtatccatttatatattatatactacccatttatatattatacttatccacttatttaatgtctttataaggtttgatccatgatatttctaatattttagttgatatgtatatgaaaaggtactatttgaactctcttactctgtataaaggttggatcatccttaaagtgggtctatttaattttattgcttcttacagataaaaaaaaaattatgagttggtttgataaaatattgaaggatttaaaataataataaataacatataatatatgtatataaatttattataatataacatttatctataaaaaagtaaatattgtcataaatctatacaatcgtttagccttgctggaacgaatctcaattatttaaacgagagtaaacatatttgactttttggttatttaacaaattattatttaacactatatgaaatttttttttttatcagcaaagaataaaattaaattaagaaggacaatggtgtcccaatccttatacaaccaacttccacaagaaagtcaagtcagagacaacaaaaaaacaagcaaaggaaattttttaatttgagttgtcttgtttgctgcataatttatgcagtaaaacactacacataacccttttagcagtagagcaatggttgaccgtgtgcttagcttcttttattttatttttttatcagcaaagaataaataaaataaaatgagacacttcagggatgtttcaacaggtacccatcacttaagtggcgcgccgtcgacggatccgtacgctagcctaagtacgtactcaaaatgccaacaaataaaaaaaaagttgctttaataatgccaaaacaaattaataaaacacttacaacaccggattttttttaattaaaatgtgccatttaggataaatagttaatatttttaataattatttaaaaagccgtatctactaaaatgatttttatttggttgaaaatattaatatgtttaaatcaacacaatctatcaaaattaaactaaaaaaaaaataagtgtacgtggttaacattagtacagtaatataagaggaaaatgagaaattaagaaattgaaagcgagtctaatttttaaattatgaacctgcatatataaaaggaaagaaagaatccaggaagaaaagaaatgaaaccatgcatggtcccctcgtcatcacgagtttctgccatttgcaatagaaacactgaaacacctttctctttgtcacttaattgagatgccgaagccacctcacaccatgaacttcatgaggtgtagcacccaaggcttccatagccatgcatactgaagaatgtctcaagctcagcaccctacttctgtgacgtgtccctcattcaccttcctctcttccctataaataaccacgcctcaggttctccgcttcacaactcaaacattctctccattggtccttaaacactcatcagtcatcaccgcggccgcaccatggcgatttccgatgagcctgaaagtgtagccactgctctcaaccactcttccctgcgccgccgtccctccgccacctccaccgccggcctcttcaattcgcctgagacaaccaccgacagttccggtgatgacttggccaaggattctggttccgacgactccatcaacaacgacgacgccgccgtcaattcccaacagcaaaacgaaaaacaagacactgatttctccgtcctcaaattcgcctaccgtccttccgtccccgctcaccgcaaagtgaaggaaagtccgctcagctccgacactattttccgtcagagtcacgcgggcctcttcaacctttgtatagtagtccttgttgctgtgaatagccgactcatcattgagaatttaatgaagtatggttggttgatcaaatctggcttttggtttagtgcaaagtcattgagagactggccccttttcatgtgttgtctttctcttgtggtatttcctttcgctgcctttatggtggagaagttggcacaacggaagtgtatacccgaaccagttgttgttgtacttcatataatcattacctcaacttcgcttttctatccagttttagttattctcaagtgtgattctgcttttgtatcaggtgtcacgttaatgctgttttcttgtgttgtatggttaaaattggtgtcttttgcacatacaaactatgatatgagagcacttaccaaattagttgaaaagggagaagcactgctcgatactctgaacatggagtatccttacaacgtaaccttcaagagcttggcatatttcctgcttgcccctacattatgttaccagccaagctatcctcgcacaccttatattcgaaagggttggttgtttcgccaacttgtcaagctgatagtatttacaggagttatgggatttataatagaacaatatattaatcccatagtacaaaattcacagcatcctctcaagggaaaccttctttacgccaccgagagagttctgaagctttctgttccaaatttatatgtgtggctctgcatgttctattgctttttccacctttggttaaatatcgtggcagagcttcttcgatttggtgatcgtgaattctacaaggattggtggaatgccaaaactgtcgaagattattggaggatgtggaatatgcctgttcacaaatggatgatccgccacctatattttccatgtttaaggcacggtctaccaaaggctgctgctcttttaatttccttcctggtttctgctttattccatgagctgtgcattgctgttccttgccacatgttcaagttgtgggctttcggtggaattatgtttcaggttcctttggtcttgatcactaattatctgcaaaataaattcaaaaactcaatggttggaaatatgattttttggttcatattcagtatcgttggtcaacctatgtgtgtactgctatactaccatgacttgatgaataggaaaggcaaacttgactgagcggccgcatttcgcaccaaatcaatgaaagtaataatgaaaagtctgaataagaatacttaggcttagatgcctttgttacttgtgtaaaataacttgagtcatgtacctttggcggaaacagaataaataaaaggtgaaattccaatgctctatgtataagttagtaatacttaatgtgttctacggttgtttcaatatcatcaaactctaattgaaactttagaaccacaaatctcaatcttttcttaatgaaatgaaaaatcttaattgtaccatgtttatgttaaacaccttacaattggttggagaggaggaccaaccgatgggacaacattgggagaaagagattcaatggagatttggataggagaacaacattctttttcacttcaatacaagatgagtgcaacactaaggatatgtatgagactttcagaagctacgacaacatagatgagtgaggtggtgattcctagcaagaaagacattagaggaagccaaaatcgaacaaggaagacatcaagggcaagagacaggaccatccatctcaggaaaaggagctttgggatagtccgagaagttgtacaagaaattttttggagggtgagtgatgcattgctggtgactttaactcaatcaaaattgagaaagaaagaaaagggagggggctcacatgtgaatagaagggaaacgggagaattttacagttttgatctaatgggcatcccagctagtggtaacatattcaccatgtttaaccttcacgtacgtctttccacaatacataactattaattaatcttaaataaataaaggataaaatatttttttttcttcataaagttaaaatatgttattttttgtttagatgtatattcgaataaatctaaatatatgataatgattttttatattgattaaacatataatcaatattaaatatgatatttttttatataggttgtacacataattttataaggataaaaaatatgataaaaataaattttaaatatttttatatttacgagaaaaaaaaatattttagccataaataaatgaccagcatattttacaaccttagtaattcataaattcctatatgtatatttgaaattaaaaacagataatcgttaagggaaggaatcctacgtcatctcttgccatttgtttttcatgcaaacagaaagggacgaaaaaccacctcaccatgaatcactcttcacaccatttttactagcaaacaagtctcaacaactgaagccagctctctttccgtttctttttacaacactttctttgaaatagtagtattttttttcacatgatttattaacgtgccaaaagatgcttattgaatagagtgcacatttgtaatgtactactaattagaacatgaaaaagcattgttctaacacgataatcctgtgaaggcgttaactccaaagatccaatttcactatataaattgtgacgaaagcaaaatgaattcacatagctgagagagaaaggaaaggttaactaagaagcaatacttcagcggccgcgcgagaaactttgtatgggcatggttatttctcacttctcaccctcctttactttcttatgctaaatcctccttcccctatatctccaccctcaacccctttttctcattataacttttggtgcctagatggtgtgtgtgtgtgcgcgcgagagatctgagctcaattttcctctctcaagtcctggtcatgctttgagggaaaagggttgaggaacttatgcatcttatatctctccacctccaggattttaagccctagttactcaacccttttccctcagaatatggcaattcaggcttttaattgctttcatttggtaccatcacttgcaagatttcagagtacaaggtgaacacacacatcttcctcttcatcaattctctagtttcatccttatcttttcattcacggtaactctcactaccctctttcatcttataagttataccgggggtgtgatgttgatgagtgtaaattaaatatatgtgatctctttctctggaaaaattttcagtgtgatatacataataatctcttaatctagagattttatggctttgttatatataagcggcgcaagggcgaattctgcagatatccatcacacttgggccgcttctagctagctagggtttgggtagtgagtgtaataaagttgcaaagtttttggttaggttacgttttgaccttattattatagttcaaagggaaacattaattaaaggggattatgaaggtggatgatgcctgattggattgaggatcttactgggtgaattgagctgcttagctatggatcccacagttctacccatcaataagtgcttttgtggtagtcttgtggcttccatatctggggagcttcatttgcctttatagtattaaccttcttccaatccagcatcatccaccacccttctcttcttttctctcataataatttaaatttgttatagactctaaactttaaatgttttttttgaagtttttccgtttttctcttttgccatgatcccgttcttgctgtggagtaaccttgtccgaggtatgtgcatgattagatccatacttaatttgtgtgcatcacgaaggtgaggttgaaatgaactttgcttttttgaccttttaggaaagttcttttgttgcagtaatcaattttaattagttttaattgacactattacttttattgtcatctttgttagttttattgttgaattgagtgcatatttcctaggaaattctcttacctaacattttttatacagatctatgctcttggctcttgcccttactcttggccttgtgttggttatttgtctacatatttattgactggtcgatgagacatgtcacaattcttgggcttatttgttggtctaataaaaggagtgcttattgaaagatcaagacggagattcggttttatataaataaactaaagatgacatattagtgtgttgatgtctcttcaggataatttttgtttgaaataatatggtaatgtcttgtctaaatttgtgtacataattcttactgatttttggattgttggatttttataaacaaatctggggccgcttctagctagctagggtttgggtagtgagtgtaataaagttgcaaagtttttggttaggttacgttttgaccttattattatagttcaaagggaaacattaattaaaggggattatgaagtgggctctcttgattcttggatgaggatcttactgggtgaattgagctgcttagctatggatcccacagttctacccatcaataagtgcttttgtggtagtcttgtggcttccatatctggggagcttcatttgcctttatagtattaaccttctccaagaacaaagagagcccacacccttctcttcttttctctcataataatttaaatttgttatagactctaaactttaaatgttttttttgaagtttttccgtttttctcttttgccatgatcccgttcttgctgtggagtaaccttgtccgaggtatgtgcatgattagatccatacttaatttgtgtgcatcacgaaggtgaggttgaaatgaactttgcttttttgaccttttaggaaagttcttttgttgcagtaatcaattttaattagttttaattgacactattacttttattgtcatctttgttagttttattgttgaattgagtgcatatttcctaggaaattctcttacctaacattttttatacagatctatgctcttggctcttgcccttactcttggccttgtgttggttatttgtctacatatttattgactggtcgatgagacatgtcacaattcttgggcttatttgttggtctaataaaaggagtgcttattgaaagatcaagacggagattcggttttatataaataaactaaagatgacatattagtgtgttgatgtctcttcaggataatttttgtttgaaataatatggtaatgtcttgtctaaatttgtgtacataattcttactgattttttggattgttggatttttataaacaaatctggggcccaagcggccgcatgagccgtaaaggttcaatacaacgagtgcttgttttcttagggacaagcattgtacttatgtatgattctgtgtaaccatgagtcttccacgttgtactaatgtgaagggcaaaaataaaacacagaacaagttcgtttttctcaaataatgtgaaggtagaaaatggaaccatgcctcctctcttgcatgtgatttaaaatattagcagatggtacgtcgagtcgacctgcaggtcgactcgacgtacgtcctcgaagagaagggttaataacacattttttaacatttttaacacaaattttagttatttaaaaatttattaaaaaatttaaaataagaagaggaactctttaaataaatctaacttacaaaatttatgatttttaataagttttcaccaataaaaaatgtcataaaaatatgttaaaaagtatattatcaatattctctttatgataaataaaaagaaaaaaaaaataaaagttaagtgaaaatgagattgaagtgactttaggtgtgtataaatatatcaaccccgccaacaatttatttaatccaaatatattgaagtatattattccatagcctttatttatttatatatttattatataaaagctttatttgttctaggttgttcatgaaatatttttttggttttatctccgttgtaagaaaatcatgtgctttgtgtcgccactcactattgcagctttttcatgcattggtcagattgacggttgattgtatttttgttttttatggttttgtgttatgacttaagtcttcatctctttatctcttcatcaggtttgatggttacctaatatggtccatgggtacatgcatggttaaattaggtggccaactttgttgtgaacgatagaattttttttatattaagtaaactatttttatattatgaaataataataaaaaaaatattttatcattattaacaaaatcatattagttaatttgttaactctataataaaagaaatactgtaacattcacattacatggtaacatctttccaccctttcatttgttttttgtttgatgactttttttcttgtttaaatttatttcccttcttttaaatttggaatacattatcatcatatataaactaaaatactaaaaacaggattacacaaatgataaataataacacaaatatttataaatctagctgcaatatatttaaactagctatatcgatattgtaaaataaaactagctgcattgatactgataaaaaaatatcatgtgctttctggactgatgatgcagtatacttttgacattgcctttattttatttttcagaaaagctttcttagttctgggttcttcattatttgtttcccatctccattgtgaattgaatcatttgcttcgtgtcacaaatacaatttagntaggtacatgcattggtcagattcacggtttattatgtcatgacttaagttcatggtagtacattacctgccacgcatgcattatattggttagatttgataggcaaatttggttgtcaacaatataaatataaataatgtttttatattacgaaataacagtgatcaaaacaaacagttttatctttattaacaagattttgtttttgtttgatgacgttttttaatgtttacgctttcccccttcttttgaatttagaacactttatcatcataaaatcaaatactaaaaaaattacatatttcataaataataacacaaatatttttaaaaaatctgaaataataatgaacaatattacatattatcacgaaaattcattaataaaaatattatataaataaaatgtaatagtagttatatgtaggaaaaaagtactgcacgcataatatatacaaaaagattaaaatgaactattataaataataacactaaattaatggtgaatcatatcaaaataatgaaaaagtaaataaaatttgtaattaacttctatatgtattacacacacaaataataaataatagtaaaaaaaattatgataaatatttaccatctcataagatatttaaaataatgataaaaatatagattattttttatgcaactagctagccaaaaagagaacacgggtatatataaaaagagtacctttaaattctactgtacttcctttattcctgacgtttttatatcaagtggacatacgtgaagattttaattatcagtctaaatatttcattagcacttaatacttttctgttttattcctatcctataagtagtcccgattctcccaacattgcttattcacacaactaactaagaaagtcttccatagccccccaagcggccgctagtcgactaagtcatcaactattccaagctacgtatttgggagtttgtggagtacagcaagatgatatacctagacggtgatatccaagtttttgacaacattgaccacttgtttgacttgcctgataactacttctatgcggtgatggactgtttctgtgagccaacttggggccacactaaacaatatcagatcggttactgccagcagtgcccccataaggttcagtggcccactcactttgggcccaaacctcctctctatttcaatgctggcatgtttgtgtatgagcccaatttggctacttaccgtgacctccttcaaacagtccaagtcacccagcccacttcctttgctgaacaggattttttgaacatgtacttcaaggacaaatataggccaattcctaatgtctacaatcttgtgctggccatgctgtggcgtcaccctgagaacgttgagcttgacaaagttaaagtggttcactactgtgctgctgggtctaagccttggaggtacactgggaagtgactcgaggtcatcaattactccaagctacgtatttgggagttcgtggagtacaagaagacgatatacctagacggtgacatccaagtatttggaaacatagaccacttgtttgatctgcctgataattatttctatgcggtgatggattgtttctgcgagaagacttggagccacacccctcagttccagattgggtactgccaacagtgccctgataaggttcaatggccctctcactttggttccaaacctcctctatatttcaatgctggcatgtttgtttatgagcctaatctcgacacctaccgtgatcttctccaaactgtccaactcaccaagcccacttcttttgctgagcaggactttctcaacatgtacttcaaggacaagtacaagccaataccgaacatgtacaaccttgtgctggccatgttgtggcgtcaccctgaaaatgttgaacttgataaagttcaagtggttcattactgtgctgctgggtctaagccttggaggttcactgggaagtaactgcaggtcatcaactactccaagctccgtatatgggagtttgtggagtacagcaagatgatatacttggacggagacattgaggtatatgagaacatagaccacctatttgacctacctgatggtaacttttacgctgtgatggattgtttctgcgagaagacatggagtcacacccctcagtacaaggtgggttactgccagcaatgcccggagaaggtgcggtggcccaccgaattgggtcagcccccttctctttacttcaacgctggcatgttcgtgttcgaacccaacatcgccacctatcatgacctattgaaaacggtgcaagtcaccactcccacctcgttcgctgaacaagatttcttgaacatgtacttcaaggacatttacaagccaatccctttaaattacaatcttgtcctcgccatgctgtggcgccacccggaaaacgttaaattagaccaagtcaaggttgttcactattgcgcagcggggtccaagccatggagatatacggggaagtagcctaggcgtacgcaggtaagtttctgcttctacctttgatatatatataataattatcattaattagtagtaatataatatttcaaatatttttttcaaaataaaagaatgtagtatatagcaattgcttttctgtagtttataagtgtgtatattttaatttataacttttctaatatatgaccaaaacatggtgatgtgcaggtcctaggctacttccccgtatatctccatggcttggaccccgctgcgcaatagtgaacaaccttgacttggtctaatttaacgttttccgggtggcgccacagcatggcgaggacaagattgtaatttaaagggattggcttgtaaatgtccttgaagtacatgttcaagaaatcttgttcagcgaacgaggtgggagtggtgacttgcaccgttttcaataggtcatgataggtggcgatgttgggttcgaacacgaacatgccagcgttgaagtaaagagaagggggctgacccaattcggtgggccaccgcaccttctccgggcattgctggcagtaacccaccttgtactgaggggtgtgactccatgtcttctcgcagaaacaatccatcacagcgtaaaagttaccatcaggtaggtcaaataggtggtctatgttctcatatacctcaatgtctccgtccaagtatatcatcttgctgtactccacaaactcccatatacggagcttggagtagttgatgacctgcagttacttcccagtgaacctccaaggcttagacccagcagcacagtaatgaaccacttgaactttatcaagttcaacattttcagggtgacgccacaacatggccagcacaaggttgtacatgttcggtattggcttgtacttgtccttgaagtacatgttgagaaagtcctgctcagcaaaagaagtgggcttggtgagttggacagtttggagaagatcacggtaggtgtcgagattaggctcataaacaaacatgccagcattgaaatatagaggaggtttggaaccaaagtgagagggccattgaaccttatcagggcactgttggcagtacccaatctggaactgaggggtgtggctccaagtcttctcgcagaaacaatccatcaccgcatagaaataattatcaggcagatcaaacaagtggtctatgtttccaaatacttggatgtcaccgtctaggtatatcgtcttcttgtactccacgaactcccaaatacgtagcttggagtaattgatgacctcgagtcacttcccagtgtacctccaaggcttagacccagcagcacagtagtgaaccactttaactttgtcaagctcaacgttctcagggtgacgccacagcatggccagcacaagattgtagacattaggaattggcctatatttgtccttgaagtacatgttcaaaaaatcctgttcagcaaaggaagtgggctgggtgacttggactgtttgaaggaggtcacggtaagtagccaaattgggctcatacacaaacatgccagcattgaaatagagaggaggtttgggcccaaagtgagtgggccactgaaccttatgggggcactgctggcagtaaccgatctgatattgtttagtgtggccccaagttggctcacagaaacagtccatcaccgcatagaagtagttatcaggcaagtcaaacaagtggtcaatgttgtcaaaaacttggatatcaccgtctaggtatatcatcttgctgtactccacaaactcccaaatacgtagcttggaatagttgatgacttagtcgactagcggccgcgacacaagtgtgagagtactaaataaatgctttggttgtacgaaatcattacactaaataaaataatcaaagcttatatatgccttccgctaaggccgaatgcaaagaaattggttctttctcgttatcttttgccacttttactagtacgtattaattactacttaatcatctttgtttacggctcattatatccggtctaggccaaggccgcgaagttaaaagcaatgttgtcacttgtacgtactaacacatgatgtgatagtttatgctagctagctataacataagctgtctctgagtgtgttgtatattaataaagatcatcactggtgaatggtgatcgtgtacgtaccctacttagtaggcaatggaagcacttagagtgtgctttgtgcatggccttgcctctgttttgagacttttgtaatgttttcgagtttaaatctttgcctttgcgtacgtgggcggatcccctgcaggagatccaagcttggcgcgccggaattaattaggtaatttcacgcgccggatccttaattaagtctagagtcgactgtttaattctagtggccggcccagctgatgatcccggtgaagttcctattccgaagttcctattctccagaaagtataggaacttc

SEQ ID NO: 39 - DNA, 2511 bp, Arabidopsis thaliana
atgccgactggtaggttcgagactatgcgtgaatgggtttatgacgctatctctgctcaacgcaatgagctcctctctcttttctccagatatgtagcccagggaaaggggatattgcagtcccaccagctgattgatgagttccttaagactgtgaaagttgatggaacattagaagatcttaacaaaagtccattcatgaaagttctgcagtctgcagaggaagccatagttttgcctccatttgttgctttggctatacgtcccagacctggtgttagggaatatgtccgtgtgaatgtgtatgagctgagcgtagatcatttaactgtttctgaatatcttcggtttaaggaagagctcgttaatggccatgccaatggagattatctccttgaacttgattttgaacctttcaatgcaacattgcctcgcccaactcgttcatcatccattgggaatggggttcagttcctcaatcgtcacctctcttcaattatgttccgtaacaaagaaagcatggagcctttgcttgagtttctccgcactcacaaacatgatggccgtcctatgatgctgaatgatcgaatacagaatatccccatacttcagggagctttggcaagagcagaggagttcctttctaaacttcctctggcaacaccatactctgaattcgaatttgaactacaagggatgggatttgaaaggggatggggtgacacagcacagaaggtttcagaaatggtgcatcttcttctggacatactccaggcacctgatccttctgtcttggagacgtttctaggaaggattcctatggtgttcaatgttgtgattttgtctccgcatggttactttggccaagccaatgtcttgggtctgcctgatactggtggacaggttgtctacattcttgatcaagtacgtgcattggaaaatgagatgctccttaggatacagaagcaaggactggaagttattccaaagattctcattgtaacaagactgctacccgaagcaaagggaacaacgtgcaaccagaggttagaaagagttagtggtacagaacacgcacacattctgcgaataccatttaggactgaaaagggaattcttcgcaagtggatctcaaggtttgatgtctggccatacctggagacttttgcagaggatgcatcaaatgaaatttctgcggagttgcagggtgtaccaaatctcatcattggcaactacagtgatggaaatctcgttgcttctttgttagctagtaagctaggtgtgatacagtgtaatattgctcatgctttagagaaaaccaagtaccccgagtctgacatttactggagaaaccatgaagataagtatcacttttcaagtcagttcactgcagatctaattgccatgaataatgccgatttcatcatcaccagcacataccaagagattgcgggaagcaagaacaatgttgggcaatacgagagccacacagctttcactatgcctggtctttaccgagttgttcatggaattgatgtctttgatcctaagtttaatatagtctctccaggagctgatatgaccatatactttccatattctgacaaggaaagaagactcactgcccttcatgagtcaattgaagaactcctctttagtgccgaacagaatgatgagcatgttggtttactgagcgaccaatcgaagccaatcatcttctctatggcaagacttgacagggtgaaaaacttgactgggctagttgaatgctatgccaagaatagcaagcttagagagcttgcaaatcttgttatagtcggtggctacatcgatgagaatcagtccagggatagagaggaaatggctgagatacaaaagatgcacagcctgattgagcagtatgatttacacggtgagtttaggtggatagctgctcaaatgaaccgtgctcgaaatggtgagctttaccgttatatcgcagacacaaaaggtgtttttgttcagcctgctttctatgaagcatttgggcttacggttgtggaatcaatgacttgtgcactcccaacgtttgctacctgtcatggtggacccgcagagattatcgaaaacggagtttctgggttccacattgacccatatcatccagaccaggttgcagctaccttggtcagcttctttgagacctgtaacaccaatccaaatcattgggttaaaatctctgaaggagggctcaagcgaatctatgaaaggtacacatggaagaagtactcagagagactgcttaccctggctggagtctatgcattctggaaacatgtgtctaagctcgaaaggagagaaacacgacgttacctagagatgttttactcattgaaatttcgtgatttggccaattcaatcccgctggcaacagatgagaactgatcatgacagggtaggattttatttcctgcactttctttagatcttttgtttgtgttatcttgaataaaaattgttgggttttgtttc

SEQ ID NO: 40 - protein, 807 aa, Arabidopsis thaliana
MPTGRFETMREWVYDAISAQRNELLSLFSRYVAQGKGILQSHQLIDEFLKTVKVDGTLEDLNKSPFMKVLQSAEEAIVLPPFVALAIRPRPGVREYVRVNVYELSVDHLTVSEYLRFKEELVNGHANGDYLLELDFEPFNATLPRPTRSSSIGNGVQFLNRHLSSIMFRNKESMEPLLEFLRTHKHDGRPMMLNDRIQNIPILQGALARAEEFLSKLPLATPYSEFEFELQGMGFERGWGDTAQKVSEMVHLLLDILQAPDPSVLETFLGRIPMVFNVVILSPHGYFGQANVLGLPDTGGQVVYILDQVRALENEMLLRIQKQGLEVIPKILIVTRLLPEAKGTTCNQRLERVSGTEHAHILRIPFRTEKGILRKWISRFDVWPYLETFAEDASNEISAELQGVPNLIIGNYSDGNLVASLLASKLGVIQCNIAHALEKTKYPESDIYWRNHEDKYHFSSQFTADLIAMNNADFIITSTYQEIAGSKNNVGQYESHTAFTMPGLYRVVHGIDVFDPKFNIVSPGADMTIYFPYSDKERRLTALHESIEELLFSAEQNDEHVGLLSDQSKPIIFSMARLDRVKNLTGLVECYAKNSKLRELANLVIVGGYIDENQSRDREEMAEIQKMHSLIEQYDLHGEFRWIAAQMNRARNGELYRYIADTKGVFVQPAFYEAFGLTVVESMTCALPTFATCHGGPAEIIENGVSGFHIDPYHPDQVAATLVSFFETCNTNPNHWVKISEGGLKRIYERYTWKKYSERLLTLAGVYAFWKHVSKLERRETRRYLEMFYSLKFRDLANSIPLATDEN

SEQ ID NO: 41 - DNA, 5241 bp, Glycine max
ccttatcgttgttctgcctctcctctgtttcggtgctctgttcaccacttccacgtgagaatgatcttccttctttgcatgttcattctctcgtgaccactggatcagactccatgttctgatccagggtctctctctaacgcctgtactttcatccatgaccaccttaaaaacaacatgggggtggtgctgttacactaactctgtttctggggtgctgtctttgttcaattttactcagaaaatatcttttcttggattctattcggtgtgtgggaacatgatcctgtcggtcggttgtttttaggttaatccttaactggttacaaggatctaacgcttgaatgcatgtcctgagttaaagaaacaaaagaagaacacacctagtacagcctggcctcgaaccaagaacttctttgttggtttctcattattactaaaataaaataaagtatacgttttcttttttctttgggatgaacggttcagacttatgagaagtttaagctaatcctgtagtggagtgttcaatttattttaaactttaaagcaatagctcaagcactaaacttctttttcaagttcaaccactttggtagcttgctaattgctgctattgttctaattaattaatgtaattattgtttaaaaaagaaaagttggtgacactggaataaaaaagtgtactatctggcaattattcttctgcagcaatgtttgaggttgaaatcttagtagaacaaagtagaagatctggtatttatattttttgtagacagatggtgggggtgggtggtaggccttgaaatccaatatagttttgtagaataattttattattttttttttttgctcacttgtttgtggtattgattttgtgatgactcaagattaatgatttaccttcatttttttcatggtgacatattatgtatattcttgatctgtttcttacacttctttttcgttgttgtagctgttgaagtctttccctagccaatggccaccgatcgtttgacccgggttcacagtctccgtgagaggcttgatgaaaccctcactgccaacaggaatgaaattttggcccttctgtcaaggtaactcatcattcttgtttttggtttagaagatttttttaaaagtcaaagtgttttctctctttaatggtagtgaagttctactaactatgtttagacagtgagtttgtttaaggaaactcaatttgtgtttgtgtgtgttctgtctttaaaggtggtgaaagttctactatgtatgtgttgtggaagcagtagtgtaacactaagaatgttatgaaattttgataggatcgaagccaagggcaagggcatcctgcaacaccaccaggtcattgctgagtttgaggaaatccctgaggagaacagacagaagctcactgatggtgcctttggagaagtcttgagatctacacaggtaactaacatttgagctttaaaaataggagaggttttagctatgatccttggtgttttttttgttttgttgattttcttatttctatgttgtaggaagccatagttttgccaccatgggttgctctggctgttcgtccaagacctggtgtgtgggagtacctgagagtgaatgtgcacgctcttgttgttgaggagttgcaacctgctgagtacctgcacttcaaggaagaacttgttgacggaaggtgaagaaaaaaaggctttgaatttgtgttaaagcggtgtacttgttttgttatgttacttgcacaaattataaacatttctctcactttcattgcagttctaatggcaactttgtgcttgagttggactttgaaccattcaatgcagccttcccccgcccaactcttaacaagtcaattggaaatggtgtgcaattcctcaaccgtcacctttctgccaaactcttccacgacaaggagagcttgcacccacttttggagttcctcaggcttcacagcgtcaagggaaaggtaggtgtctatttctactctttaaactagagtaaagcaaggtagtgaggagtttatgcatgtgtaagacacattcttcagtagttcaatggcttgaatatctacatccatgtttggaccatgtctagtaaccagatctagagtacaaatctaatgtgtgtagcatatagtatctctagcatgttgaacttaaggcatgaagttagttttaataggttaattttgttgtgtattttactgatgaagatttttattttttggaatatgcagactttgatgttgaatgacagaattcaaaacccagatgcactccaacatgttctgaggaaagctgaggagtatctgggcacagtgcctcctgaaactccctactcagaatttgagcacaagttccaggagattggtttggagagagggtggggtgacaacgcggagcgtgtccttgagtcaattcaacttctcttggatcttcttgaggcccctgacccgtgcacccttgagactttccttggaagaatccctatggtgttcaatgttgttattctttctccccatggttactttgcccaagataatgtcttgggataccctgacactggtggccaggttgtttacatcttggatcaagttcgtgctttggagaatgagatgctccatcgcattaagcaacaaggattggacattgttcctcgtattctcattgtatgtcctagtacatagttgtgaagtgtttcagcaagctaaattaagcttacttgtgtatagtgtgtgtaatgtggatatgttattctaattggtgcttgtgaatgttgttaaaatgcagatcacccgtcttctccccgatgcagtaggaactacttgtggccaacgtcttgagaaggtgttcggaactgagcactcccacattcttcgagttccctttagaactgagaagggaattgttcgcaagtggatctcaagattcgaagtctggccctacttggaaacttacactgaggtaaatttttgaccccatcataatattgacaccgtttaagaatttttgatgtgttttaacttatccaatccaaattgtgtcttgttaacaggatgttgcccacgagcttgccaaagagttgcaaggcaagccagatctgattgttggaaactacagtgatggaaacattgtcgcttctttgttggcacataaattaggtgtcactcaggttggtctacataacatgtctagttaaagttgttaggaccttatactttggaattcaggggcctaagttttttctctttgtcaactgtagtgtaccattgctcacgcacttgagaagaccaaataccccgaatccgacatttactggaaaaaattggaagagagataccacttctcttgccaattcacagctgatctatttgccatgaaccacacagatttcattatcaccagtaccttccaggagattgctggaaggtgagctaacccttttacatttttgttcttttgcctattttttcatttattttattgattagcttactaaaattcttgtatcattgttcaaatacttttacagcaaggacactgttggacagtacgaatctcacacagccttcacccttcctggactctaccgcgttgtgcatggtattgatgtctttgatccaaaattcaacattgtctcccctggagctgatcaaaccatttacttcccccacactgaaaccagccgtaggttgacatccttccaccctgaaatcgaagaactcctttacagctcagtggagaatgaagaacacatgttagtttctcctctcatttccttgatgttatctaatcatagtatcatgaatggtcacaatttcatcaaaatgtttgatattgtgagaaattgcagacagacacagctgggttagaccacaaagaaccgtttttttttttttttaaaaaaagaagaaaaccttggatatcatcatgcatagaagaacatttgtctaatgcaaattcatgtatgacagatgtgtgctgaaggaccgcagcaagccaattatcttcaccatggcaaggttggatcgagtgaagaacatcacaggacttgtggagtggtacggtaagaacgcgaagctgagggagctggtgaaccttgtggttgttgctggagacaggaggaaggagtcaaaggacttggaagaaaaggccgagatgaagaagatgtacggcctgatcgagacctacaagttgaacggccaattcagatggatttcatcgcagatgaaccgtgtgaggaatggagagctctaccgcgtgatctgcgacaccaggggtgctttcgtgcagcctgctgtatacgaggcttttggtttgacagtggttgaggccatgacttgcggcttgccaacattcgccacatgcaatggtggtcctgctgagatcattgtgcacggcaagtctggcttccacattgacccttaccatggtgaccgtgctgctgatctccttgttgacttctttgagaagtgcaagcttgacccaactcactgggacaagatctcaaaggctggtctccagcgtattgaagagaagtaagcatattaattctgaatcaatgtgtttctgttctgtctgttgtggtaattaatcattttctttcttcttccacaggtacacatggcaaatttactctcagaggcttctcactctcaccggtgtctatggcttctggaagcatgtgtctaaccttgaccgccgtgagagccgccgctatctcgagatgttctatgctctcaagtaccgcaaattggtatgtatagtatagtactccctctgctcatttttattcagtgaattttacactataatttttttcttattaaaagggctattttctcttcatatttttaccttgaaatatgttgtcattgaacttgctaatgtatcttgttattgtttttacctttaggctgagtctgtgccccttgctgctgagtaaactgaggataaagagttggataaagaaatggaggaaccggctttttctttctcatttggagtttgtcgcacttgagttttataaataatgtccgtgattttagttttgtgattaagctttcgataagaggagagaaagagaaggaaaaaaaaagttgcttttttttttgttgttgcatgatttggatcttgattggaaaagcttcgaattggggtagttttacccatcaattcaattttaagccgtgccttcttcactttgccgtgtctaata

SEQ ID NO: 42 - DNA, 3132 bp, Glycine max
ccttatcgttgttctgcctctcctctgtttcggtgctctgttcaccacttccacgtgagaatgatcttccttctttgcatgttcattctctcgtgaccactggatcagactccatgttctgatccagggtctctctctaacgcctgtactttcatccatgaccaccttaaaaacaacatgggggtggtgctgttacactaactctgtttctggggtgctgtctttgttcaattttactcagaaaatatcttttcttggattctattcggtgtgtgggaacatgatcctgtcggtcggttgtttttaggttaatccttaactggttacaaggatctaacgcttgaatgcatgtcctgagttaaagaaacaaaagaagaacacacctagtacagcctggcctcgaaccaagaacttctttctgttgaagtctttccctagccaatggccaccgatcgtttgacccgggttcacagtctccgtgagaggcttgatgaaaccctcactgccaacaggaatgaaattttggcccttctgtcaaggatcgaagccaagggcaagggcatcctgcaacaccaccaggtcattgctgagtttgaggaaatccctgaggagaacagacagaagctcactgatggtgcctttggagaagtcttgagatctacacaggaagccatagttttgccaccatgggttgctctggctgttcgtccaagacctggtgtgtgggagtacctgagagtgaatgtgcacgctcttgttgttgaggagttgcaacctgctgagtacctgcacttcaaggaagaacttgttgacggaagttctaatggcaactttgtgcttgagttggactttgaaccattcaatgcagccttcccccgcccaactcttaacaagtcaattggaaatggtgtgcaattcctcaaccgtcacctttctgccaaactcttccacgacaaggagagcttgcacccacttttggagttcctcaggcttcacagcgtcaagggaaagactttgatgttgaatgacagaattcaaaacccagatgcactccaacatgttctgaggaaagctgaggagtatctgggcacagtgcctcctgaaactccctactcagaatttgagcacaagttccaggagattggtttggagagagggtggggtgacaacgcggagcgtgtccttgagtcaattcaacttctcttggatcttcttgaggcccctgacccgtgcacccttgagactttccttggaagaatccctatggtgttcaatgttgttattctttctccccatggttactttgcccaagataatgtcttgggataccctgacactggtggccaggttgtttacatcttggatcaagttcgtgctttggagaatgagatgctccatcgcattaagcaacaaggattggacattgttcctcgtattctcattatcacccgtcttctccccgatgcagtaggaactacttgtggccaacgtcttgagaaggtgttcggaactgagcactcccacattcttcgagttccctttagaactgagaagggaattgttcgcaagtggatctcaagattcgaagtctggccctacttggaaacttacactgaggatgttgcccacgagcttgccaaagagttgcaaggcaagccagatctgattgttggaaactacagtgatggaaacattgtcgcttctttgttggcacataaattaggtgtcactcagtgtaccattgctcacgcacttgagaagaccaaataccccgaatccgacatttactggaaaaaattggaagagagataccacttctcttgccaattcacagctgatctatttgccatgaaccacacagatttcattatcaccagtaccttccaggagattgctggaagcaaggacactgttggacagtacgaatctcacacagccttcacccttcctggactctaccgcgttgtgcatggtattgatgtctttgatccaaaattcaacattgtctcccctggagctgatcaaaccatttacttcccccacactgaaaccagccgtaggttgacatccttccaccctgaaatcgaagaactcctttacagctcagtggagaatgaagaacacatatgtgtgctgaaggaccgcagcaagccaattatcttcaccatggcaaggttggatcgagtgaagaacatcacaggacttgtggagtggtacggtaagaacgcgaagctgagggagctggtgaaccttgtggttgttgctggagacaggaggaaggagtcaaaggacttggaagaaaaggccgagatgaagaagatgtacggcctgatcgagacctacaagttgaacggccaattcagatggatttcatcgcagatgaaccgtgtgaggaatggagagctctaccgcgtgatctgcgacaccaggggtgctttcgtgcagcctgctgtatacgaggcttttggtttgacagtggttgaggccatgacttgcggcttgccaacattcgccacatgcaatggtggtcctgctgagatcattgtgcacggcaagtctggcttccacattgacccttaccatggtgaccgtgctgctgatctccttgttgacttctttgagaagtgcaagcttgacccaactcactgggacaagatctcaaaggctggtctccagcgtattgaagagaagtacacatggcaaatttactctcagaggcttctcactctcaccggtgtctatggcttctggaagcatgtgtctaaccttgaccgccgtgagagccgccgctatctcgagatgttctatgctctcaagtaccgcaaattggctgagtctgtgccccttgctgctgagtaaactgaggataaagagttggataaagaaatggaggaaccggctttttctttctcatttggagtttgtcgcacttgagttttataaataatgtccgtgattttagttttgtgattaagctttcgataagaggagagaaagagaaggaaaaaaaaagttgcttttttttttgttgttgcatgatttggatcttgattggaaaagcttcgaattggggtagttttacccatcaattcaattttaagccgtgccttcttcactttgccgtgtctaata

SEQ ID NO: 43 - DNA, 2418 bp, Glycine max
atggccaccgatcgtttgacccgggttcacagtctccgtgagaggcttgatgaaaccctcactgccaacaggaatgaaattttggcccttctgtcaaggatcgaagccaagggcaagggcatcctgcaacaccaccaggtcattgctgagtttgaggaaatccctgaggagaacagacagaagctcactgatggtgcctttggagaagtcttgagatctacacaggaagccatagttttgccaccatgggttgctctggctgttcgtccaagacctggtgtgtgggagtacctgagagtgaatgtgcacgctcttgttgttgaggagttgcaacctgctgagtacctgcacttcaaggaagaacttgttgacggaagttctaatggcaactttgtgcttgagttggactttgaaccattcaatgcagccttcccccgcccaactcttaacaagtcaattggaaatggtgtgcaattcctcaaccgtcacctttctgccaaactcttccacgacaaggagagcttgcacccacttttggagttcctcaggcttcacagcgtcaagggaaagactttgatgttgaatgacagaattcaaaacccagatgcactccaacatgttctgaggaaagctgaggagtatctgggcacagtgcctcctgaaactccctactcagaatttgagcacaagttccaggagattggtttggagagagggtggggtgacaacgcggagcgtgtccttgagtcaattcaacttctcttggatcttcttgaggcccctgacccgtgcacccttgagactttccttggaagaatccctatggtgttcaatgttgttattctttctccccatggttactttgcccaagataatgtcttgggataccctgacactggtggccaggttgtttacatcttggatcaagttcgtgctttggagaatgagatgctccatcgcattaagcaacaaggattggacattgttcctcgtattctcattatcacccgtcttctccccgatgcagtaggaactacttgtggccaacgtcttgagaaggtgttcggaactgagcactcccacattcttcgagttccctttagaactgagaagggaattgttcgcaagtggatctcaagattcgaagtctggccctacttggaaacttacactgaggatgttgcccacgagcttgccaaagagttgcaaggcaagccagatctgattgttggaaactacagtgatggaaacattgtcgcttctttgttggcacataaattaggtgtcactcagtgtaccattgctcacgcacttgagaagaccaaataccccgaatccgacatttactggaaaaaattggaagagagataccacttctcttgccaattcacagctgatctatttgccatgaaccacacagatttcattatcaccagtaccttccaggagattgctggaagcaaggacactgttggacagtacgaatctcacacagccttcacccttcctggactctaccgcgttgtgcatggtattgatgtctttgatccaaaattcaacattgtctcccctggagctgatcaaaccatttacttcccccacactgaaaccagccgtaggttgacatccttccaccctgaaatcgaagaactcctttacagctcagtggagaatgaagaacacatatgtgtgctgaaggaccgcagcaagccaattatcttcaccatggcaaggttggatcgagtgaagaacatcacaggacttgtggagtggtacggtaagaacgcgaagctgagggagctggtgaaccttgtggttgttgctggagacaggaggaaggagtcaaaggacttggaagaaaaggccgagatgaagaagatgtacggcctgatcgagacctacaagttgaacggccaattcagatggatttcatcgcagatgaaccgtgtgaggaatggagagctctaccgcgtgatctgcgacaccaggggtgctttcgtgcagcctgctgtatacgaggcttttggtttgacagtggttgaggccatgacttgcggcttgccaacattcgccacatgcaatggtggtcctgctgagatcattgtgcacggcaagtctggcttccacattgacccttaccatggtgaccgtgctgctgatctccttgttgacttctttgagaagtgcaagcttgacccaactcactgggacaagatctcaaaggctggtctccagcgtattgaagagaagtacacatggcaaatttactctcagaggcttctcactctcaccggtgtctatggcttctggaagcatgtgtctaaccttgaccgccgtgagagccgccgctatctcgagatgttctatgctctcaagtaccgcaaattggctgagtctgtgccccttgctgctgagtaa

SEQ ID NO: 44 - protein, 805 aa, Glycine max
MATDRLTRVHSLRERLDETLTANRNEILALLSRIEAKGKGILQHHQVIAEFEEIPEENRQKLTDGAFGEVLRSTQEAIVLPPWVALAVRPRPGVWEYLRVNVHALVVEELQPAEYLHFKEELVDGSSNGNFVLELDFEPFNAAFPRPTLNKSIGNGVQFLNRHLSAKLFHDKESLHPLLEFLRLHSVKGKTLMLNDRIQNPDALQHVLRKAEEYLGTVPPETPYSEFEHKFQEIGLERGWGDNAERVLESIQLLLDLLEAPDPCTLETFLGRIPMVFNVVILSPHGYFAQDNVLGYPDTGGQVVYILDQVRALENEMLHRIKQQGLDIVPRILIITRLLPDAVGTTCGQRLEKVFGTEHSHILRVPFRTEKGIVRKWISRFEVWPYLETYTEDVAHELAKELQGKPDLIVGNYSDGNIVASLLAHKLGVTQCTIAHALEKTKYPESDIYWKKLEERYHFSCQFTADLFAMNHTDFIITSTFQEIAGSKDTVGQYESHTAFTLPGLYRVVHGIDVFDPKFNIVSPGADQTIYFPHTETSRRLTSFHPEIEELLYSSVENEEHICVLKDRSKPIIFTMARLDRVKNITGLVEWYGKNAKLRELVNLVVVAGDRRKESKDLEEKAEMKKMYGLIETYKLNGQFRWISSQMNRVRNGELYRVICDTRGAFVQPAVYEAFGLTVVEAMTCGLPTFATCNGGPAEIIVHGKSGFHIDPYHGDRAADLLVDFFEKCKLDPTHWDKISKAGLQRIEEKYTWQIYSQRLLTLTGVYGFWKHVSNLDRRESRRYLEMFYALKYRKLAESVPLAAE

SEQ ID NO: 45 - DNA, 313 bp, Glycine max
cccccctctcttttttgcgttcattctgttttcctgttgaagtctttccctagccaatggccaccgatcgtttgacccgggttcacagtctccgtgagaggcttgatgaaaccctcactgccaacaggaatgaaattttggcccttctgtcaaggatcgaagccaagggcaagggcatcctgcaacaccaccaggtcattgctgagtttgaggaaatccctgaggagaacagacagaagctcactgatggtgcctttggagaagtcttgagatctacacaggaagccatagttttgccaccatgggttgctct

SEQ ID NO: 46 - DNA, 3191 bp, Glycine max
aggtaaattgcagctgaaggacagtgaagggtgaatttatccatttaaaccattttctttttaacacatttcttatggtaatctcttctcactacactataaaaatggcttctcaatcccattttctacatcatcccattctattgagttttgtttatttgctttcacttttttttttatctgcctcttcccttaatttgcttgacttcttcttcacattttgctttgttttctcctccggcttccggtatttcaaattcaagatgagcaagttgaaatttataaatagaaatacagatattatttacaacgtcaaatctttggtattttcaatatttgaatggggtaaatttgtcatatagtcatcatcactgactacttatctaacctatttaatttggagcatattctttataaggtccctctcacggccaatgtctaattattgatatacagctcttgttttctagtgctgcttataatattatctacacatatatatggtactgcacactactactatatagtagtaagtaaactagcaacagccggggccaaactccaataactaggcattggggtttagttggtaatataaatataacatcaaaaagtctttgcttgtgacgaacatcacaatgcacccaccattgatgccacgacagacattgttaattttttttttaatttttaaaaaagaagcaattccaatagttctatattacaatctcacgtgatccaagcacaacgtttcattttttgtacatgctcgatatataaataatatttcattttatagtaaaatataatgacattttcgaatataatttttgaaatttcattttccaaatgaaatactaatattaatattaatgagattaccacaaatcatgttatgaatgaaataaagagttttggcattctaactttctttgaatagaacaaaatgtatacaacactctccatatatacacgatttattcagggatcatatacattctctcatgattaacatagtctgctttcttcacgtctaagcagataatttttggtccacaagataaaattatcattagtcgttttaattaattccttgagcatcaagcactaaaataattaaacttctccattaccaaaaaaaaaagataggtgattcagtaacatgtagtactagtactactgattttttttttcttttgattttaatgaatggttcgtatcgagcatcgagaaatccatttattaggtgtgtaatgtaatagtagtatttccttgattttcagtaataagatggattcttacatttatatctgtttgacagaaaatgttgtcaatgcatttcttgggcacaaagttttttgaaacatgaattaattttttcaaaatatttatgacatcaaattgaccctaaaataagtgataaagctttaacgtggaatgacattaatttttccatgataaataaaacacttaaaacattttaatattaatattataatcagttacaactatgttcaattaatgcaataacttttaaataaatattaaaatattttttttctgttctccaataaagagatcttgttgcacggaaaaagtcacattcttatttagtaaaaaattataattattgtttgaaaaatatcattttcactgcagaaaatttgatccagctctacagatcatacttttattgtacaataatacaataaaaatattcatctgcaggaaatatcattttcattgtacaataatataaagataaatatataccagaaaagaaaaagaaactgatgtggcacaatgtattcactgaaagaatgcatattgtatttcacctttcaagcagcactaagaatatacttcttttattatacttgtgcatttactcaaccaccctcggtggagtaagaaagaagatagataaaagttttttttgacatttggtgaatctcttaattaaaaaaataaaataatccatttcctttatttaatttcttttttcccatctgtgaaattccaattctgcttcgcgctcctgtctataaattgacttagccaccacctcagtttccattcattcacttcttctctttataccccccctctcttttttgcgttcattctgttttcgtaagtactgttgtttttctcttctatttctttttttgtttgtgttgtttttttttcttccttatcgttgttctgcctctcctctgtttcggtgctctgttcaccacttccacgtgagaatgatcttccttctttgcatgttcattctctcgtgaccactggatcagactccatgttctgatccagggtctctctctaacgcctgtactttcatccatgaccaccttaaaaacaacatgggggtggtgctgttacactaactctgtttctggggtgctgtctttgttcaattttactcagaaaatatcttttcttggattctattcggtgtgtgggaacatgatcctgtcggtcggttgtttttaggttaatccttaactggttacaaggatctaacgcttgaatgcatgtcctgagttaaagaaacaaaagaagaacacacctagtacagcctggcctcgaaccaagaacttctttgttggtttctcattattactaaaataaaataaagtatacgttttcttttttctttgggatgaacggttcagacttatgagaagtttaagctaatcctgtagtggagtgttcaatttattttaaactttaaagcaatagctcaagcactaaacttctttttcaagttcaaccactttggtagcttgctaattgctgctattgttctaattaattaatgtaattattgtttaaaaaagaaaagttggtgacactggaataaaaaagtgtactatctggcaattattcttctgcagcaatgtttgaggttgaaatcttagtagaacaaagtagaagatctggtatttatattttttgtagacagatggtgggggtgggtggtaggccttgaaatccaatatagttttgtagaataattttattattttttttttttgctcacttgtttgtggtattgattttgtgatgactcaagattaatgatttaccttcatttttttcatggtgacatattatgtatattcttgatctgtttcttacacttctttttcgttgttgtagctgttgaagtctttccctagcca

SEQ ID NO: 47 - DNA, 14 bp, artificial sequence
  AW box
  misc_feature (2)..(2): n is a, c, g, or t
  misc_feature (4)..(4): n is a, c, g, or t
  misc_feature (6)..(12): n is a, c, g, or t
cntngnnnnnnncg

SEQ ID NO: 48 - DNA, 43 bp, artificial sequence
  GmSuSYProm-5 forward primer
acgtacgtcctgcaggtaaattgcagctgaaggacagtgaagg

SEQ ID NO: 49 - DNA, 38 bp, artificial sequence
  GmSuSYProm-5 reverse primer
ccatggtgcggccgcagacttcaacagctacaacaacg

SEQ ID NO: 50 - DNA, 6720 bp, artificial sequence
  plasmid pLF284
cctgaattccagcacactggcggccgttactagtggatccgagctcggtaccaagcttgatgcatagcttgagtattctaacgcgtcacctaaatagcttggcgtaatcatggtcatagctgtttcctgtgtgaaattgttatccgctcacaattccacacaacatacgagccggaagcataaagtgtaaagcctggggtgcctaatgagtgagctaactcacattaattgcgttgcgctcactgcccgctttccagtcgggaaacctgtcgtgccagctgcattaatgaatcggccaacgcgcggggagaggcggtttgcgtattgggcgctcttccgcttcctcgctcactgactcgctgcgctcggtcgttcggctgcggcgagcggtatcagctcactcaaaggcggtaatacggttatccacagaatcaggggataacgcaggaaagaacatgtgagcaaaaggccagcaaaaggccaggaaccgtaaaaaggccgcgttgctggcgtttttccataggctccgcccccctgacgagcatcacaaaaatcgacgctcaagtcagaggtggcgaaacccgacaggactataaagataccaggcgtttccccctggaagctccctcgtgcgctctcctgttccgaccctgccgcttaccggatacctgtccgcctttctcccttcgggaagcgtggcgctttctcatagctcacgctgtaggtatctcagttcggtgtaggtcgttcgctccaagctgggctgtgtgcacgaaccccccgttcagcccgaccgctgcgccttatccggtaactatcgtcttgagtccaacccggtaagacacgacttatcgccactggcagcagccactggtaacaggattagcagagcgaggtatgtaggcggtgctacagagttcttgaagtggtggcctaactacggctacactagaagaacagtatttggtatctgcgctctgctgaagccagttaccttcggaaaaagagttggtagctcttgatccggcaaacaaaccaccgctggtagcggtggtttttttgtttgcaagcagcagattacgcgcagaaaaaaaggatctcaagaagatcctttgatcttttctacggggtctgacgctcagtggaacgaaaactcacgttaagggattttggtcatgagattatcaaaaaggatcttcacctagatccttttaaattaaaaatgaagttttagcacgtgtcagtcctgctcctcggccacgaagtgcacgcagttgccggccgggtcgcgcagggcgaactcccgcccccacggctgctcgccgatctcggtcatggccggcccggaggcgtcccggaagttcgtggacacgacctccgaccactcggcgtacagctcgtccaggccgcgcacccacacccaggccagggtgttgtccggcaccacctggtcctggaccgcgctgatgaacagggtcacgtcgtcccggaccacaccggcgaagtcgtcctccacgaagtcccgggagaacccgagccggtcggtccagaactcgaccgctccggcgacgtcgcgcgcggtgagcaccggaacggcactggtcaacttggccatggtggccctcctcacgtgctattattgaagcatttatcagggttattgtctcatgagcggatacatatttgaatgtatttagaaaaataaacaaataggggttccgcgcacatttccccgaaaagtgccacctgatgcggtgtgaaataccgcacagatgcgtaaggagaaaataccgcatcaggaaattgtaagcgttaataattcagaagaactcgtcaagaaggcgatagaaggcgatgcgctgcgaatcgggagcggcgataccgtaaagcacgaggaagcggtcagcccattcgccgccaagctcttcagcaatatcacgggtagccaacgctatgtcctgatagcggtccgccacacccagccggccacagtcgatgaatccagaaaagcggccattttccaccatgatattcggcaagcaggcatcgccatgggtcacgacgagatcctcgccgtcgggcatgctcgccttgagcctggcgaacagttcggctggcgcgagcccctgatgctcttcgtccagatcatcctgatcgacaagaccggcttccatccgagtacgtgctcgctcgatgcgatgtttcgcttggtggtcgaatgggcaggtagccggatcaagcgtatgcagccgccgcattgcatcagccatgatggatactttctcggcaggagcaaggtgagatgacaggagatcctgccccggcacttcgcccaatagcagccagtcccttcccgcttcagtgacaacgtcgagcacagctgcgcaaggaacgcccgtcgtggccagccacgatagccgcgctgcctcgtcttgcagttcattcagggcaccggacaggtcggtcttgacaaaaagaaccgggcgcccctgcgctgacagccggaacacggcggcatcagagcagccgattgtctgttgtgcccagtcatagccgaatagcctctccacccaagcggccggagaacctgcgtgcaatccatcttgttcaatcatgcgaaacgatcctcatcctgtctcttgatcagagcttgatcccctgcgccatcagatccttggcggcaagaaagccatccagtttactttgcagggcttcccaaccttaccagagggcgccccagctggcaattccggttcgcttgctgtccataaaaccgcccagtctagctatcgccatgtaagcccactgcaagctacctgctttctctttgcgcttgcgttttcccttgtccagatagcccagtagctgacattcatccggggtcagcaccgtttctgcggactggctttctacgtgaaaaggatctaggtgaagatcctttttgataatctcatgcctgacatttatattccccagaacatcaggttaatggcgtttttgatgtcattttcgcggtggctgagatcagccacttcttccccgataacggagaccggcacactggccatatcggtggtcatcatgcgccagctttcatccccgatatgcaccaccgggtaaagttcacgggagactttatctgacagcagacgtgcactggccagggggatcaccatccgtcgccccggcgtgtcaataatatcactctgtacatccacaaacagacgataacggctctctcttttataggtgtaaaccttaaactgccgtacgtataggctgcgcaactgttgggaagggcgatcggtgcgggcctcttcgctattacgccagctggcgaaagggggatgtgctgcaaggcgattaagttgggtaacgccagggttttcccagtcacgacgttgtaaaacgacggccagtgaattgtaatacgactcactatagggcgaattgggccctctagatgcatgctcgagcggccgccagtgtgatggatatctgcagaattcaggacgtacgtcctgcaggtaaattgcagctgaaggacagtgaagggtgaatttatccatttaaaccattttctttttaacacatttcttatggtaatctcttctcactacactataaaaatggcttctcaatcccattttctacatcatcccattctattgagttttgtttatttgctttcacttttttttttatctgcctcttcccttaatttgcttgacttcttcttcacattttgctttgttttctcctccggcttccggtatttcaaattcaagatgagcaagttgaaatttataaatagaaatacagatattatttacaacgtcaaatctttggtattttcaatatttgaatggggtaaatttgtcatatagtcatcatcactgactacttatctaacctatttaatttggagcatattctttataaggtccctctcacggccaatgtctaattattgatatacagctcttgttttctagtgctgcttataatattatctacacatatatatggtactgcacactactactatatagtagtaagtaaactagcaacagccggggccaaactccaataactaggcattggggtttagttggtaatataaatataacatcaaaaagtctttgcttgtgacgaacatcacaatgcacccaccattgatgccacgacagacattgttaattttttttttaatttttaaaaaagaagcaattccaatagttctatattacaatctcacgtgatccaagcacaacgtttcattttttgtacatgctcgatatataaataatatttcattttatagtaaaatataatgacattttcgaatataatttttgaaatttcattttccaaatgaaatactaatattaatattaatgagattaccacaaatcatgttatgaatgaaataaagagttttggcattctaactttctttgaatagaacaaaatgtatacaacactctccatatatacacgatttattcagggatcatatacattctctcatgattaacatagtctgctttcttcacgtctaagcagataatttttggtccacaagataaaattatcattagtcgttttaattaattccttgagcatcaagcactaaaataattaaacttctccattaccaaaaaaaaaagataggtgattcagtaacatgtagtactagtactactgattttttttttcttttgattttaatgaatggttcgtatcgagcatcgagaaatccatttattaggtgtgtaatgtaatagtagtatttccttgattttcagtaataagatggattcttacatttatatctgtttgacagaaaatgttgtcaatgcatttcttgggcacaaagttttttgaaacatgaattaattttttcaaaatatttatgacatcaaattgaccctaaaataagtgataaagctttaacgtggaatgacattaatttttccatgataaataaaacacttaaaacattttaatattaatattataatcagttacaactatgttcaattaatgcaataacttttaaataaatattaaaatattttttttctgttctccaataaagagatcttgttgcacggaaaaagtcacattcttatttagtaaaaaattataattattgtttgaaaaatatcattttcactgcagaaaatttgatccagctctacagatcatacttttattgtacaataatacaataaaaatattcatctgcaggaaatatcattttcattgtacaataatataaagataaatatataccagaaaagaaaaagaaactgatgtggcacaatgtattcactgaaagaatgcatattgtatttcacctttcaagcagcactaagaatatacttcttttattatacttgtgcatttactcaaccaccctcggtggagtaagaaagaagatagataaaagttttttttgacatttggtgaatctcttaattaaaaaaataaaataatccatttcctttatttaatttcttttttcccatctgtgaaattccaattctgcttcgcgctcctgtctataaattgacttagccaccacctcagtttccattcattcacttcttctctttataccccccctctcttttttgcgttcattctgttttcgtaagtactgttgtttttctcttctatttctttttttgtttgtgttgtttttttttcttccttatcgttgttctgcctctcctctgtttcggtgctctgttcaccacttccacgtgagaatgatcttccttctttgcatgttcattctctcgtgaccactggatcagactccatgttctgatccagggtctctctctaacgcctgtactttcatccatgaccaccttaaaaacaacatgggggtggtgctgttacactaactctgtttctggggtgctgtctttgttcaattttactcagaaaatatcttttcttggattctattcggtgtgtgggaacatgatcctgtcggtcggttgtttttaggttaatccttaactggttacaaggatctaacgcttgaatgcatgtcctgagttaaagaaacaaaagaagaacacacctagtacagcctggcctcgaaccaagaacttctttgttggtttctcattattactaaaataaaataaagtatacgttttcttttttctttgggatgaacggttcagacttatgagaagtttaagctaatcctgtagtggagtgttcaatttattttaaactttaaagcaatagctcaagcactaaacttctttttcaagttcaaccactttggtagcttgctaattgctgctattgttctaattaattaatgtaattattgtttaaaaaagaaaagttggtgacactggaataaaaaagtgtactatctggcaattattcttctgcagcaatgtttgaggttgaaatcttagtagaacaaagtagaagatctggtatttatattttttgtagacagatggtgggggtgggtggtaggccttgaaatccaatatagttttgtagaataattttattattttttttttttgctcacttgtttgtggtattgattttgtgatgactcaagattaatgatttaccttcatttttttcatggtgacatattatgtatattcttgatctgtttcttacacttctttttcgttgttgtagctgttgaagtctgcggccgcaccatgg

SEQ ID NO: 51 - DNA, 5933 bp, artificial sequence
  plasmid pKR1963
aattcgagctcggtacccgggggcgcgccggatccttaattaagtctagagtcgactgtttaaacctgcaggcatgcaagcttggcgtaatcatggtcatagctgtttcctgtgtgaaattgttatccgctcacaattccacacaacatacgagccggaagcataaagtgtaaagcctggggtgcctaatgagtgagctaactcacattaattgcgttgcgctcactgcccgctttccagtcgggaaacctgtcgtgccagctgcattaatgaatcggccaacgcgcggggagaggcggtttgcgtattgggcgctcttccgcttcctcgctcactgactcgctgcgctcggtcgttcggctgcggcgagcggtatcagctcactcaaaggcggtaatacggttatccacagaatcaggggataacgcaggaaagaacatgtgagcaaaaggccagcaaaaggccaggaaccgtaaaaaggccgcgttgctggcgtttttccataggctccgcccccctgacgagcatcacaaaaatcgacgctcaagtcagaggtggcgaaacccgacaggactataaagataccaggcgtttccccctggaagctccctcgtgcgctctcctgttccgaccctgccgcttaccggatacctgtccgcctttctcccttcgggaagcgtggcgctttctcatagctcacgctgtaggtatctcagttcggtgtaggtcgttcgctccaagctgggctgtgtgcacgaaccccccgttcagcccgaccgctgcgccttatccggtaactatcgtcttgagtccaacccggtaagacacgacttatcgccactggcagcagccactggtaacaggattagcagagcgaggtatgtaggcggtgctacagagttcttgaagtggtggcctaactacggctacactagaaggacagtatttggtatctgcgctctgctgaagccagttaccttcggaaaaagagttggtagctcttgatccggcaaacaaaccaccgctggtagcggtggtttttttgtttgcaagcagcagattacgcgcagaaaaaaaggatctcaagaagatcctttgatcttttctacggggtctgacgctcagtggaacgaaaactcacgttaagggattttggtcatgagattatcaaaaaggatcttcacctagatccttttaaattaaaaatgaagttttaaatcaatctaaagtatatatgagtaaacttggtctgacagttaccaatgcttaatcagtgaggcacctatctcagcgatctgtctatttcgttcatccatagttgcctgactccccgtcgtgtagataactacgatacgggagggcttaccatctggccccagtgctgcaatgataccgcgagacccacgctcaccggctccagatttatcagcaataaaccagccagccggaagggccgagcgcagaagtggtcctgcaactttatccgcctccatccagtctattaattgttgccgggaagctagagtaagtagttcgccagttaatagtttgcgcaacgttgttgccattgctacaggcatcgtggtgtcacgctcgtcgtttggtatggcttcattcagctccggttcccaacgatcaaggcgagttacatgatcccccatgttgtgcaaaaaagcggttagctccttcggtcctccgatcgttgtcagaagtaagttggccgcagtgttatcactcatggttatggcagcactgcataattctcttactgtcatgccatccgtaagatgcttttctgtgactggtgagtactcaaccaagtcattctgagaatagtgtatgcggcgaccgagttgctcttgcccggcgtcaatacgggataataccgcgccacatagcagaactttaaaagtgctcatcattggaaaacgttcttcggggcgaaaactctcaaggatcttaccgctgttgagatccagttcgatgtaacccactcgtgcacccaactgatcttcagcatcttttactttcaccagcgtttctgggtgagcaaaaacaggaaggcaaaatgccgcaaaaaagggaataagggcgacacggaaatgttgaatactcatactcttcctttttcaatattattgaagcatttatcagggttattgtctcatgagcggatacatatttgaatgtatttagaaaaataaacaaataggggttccgcgcacatttccccgaaaagtgccacctgacgtctaagaaaccattattatcatgacattaacctataaaaataggcgtatcacgaggccctttcgtctcgcgcgtttcggtgatgacggtgaaaacctctgacacatgcagctcccggagacggtcacagcttgtctgtaagcggatgccgggagcagacaagcccgtcagggcgcgtcagcgggtgttggcgggtgtcggggctggcttaactatgcggcatcagagcagattgtactgagagtgcaccatatgcggtgtgaaataccgcacagatgcgtaaggagaaaataccgcatcaggcgccattcgccattcaggctgcgcaactgttgggaagggcgatcggtgcgggcctcttcgctattacgccagctggcgaaagggggatgtgctgcaaggcgattaagttgggtaacgccagggttttcccagtcacgacgttgtaaaacgacggccagtgaattcaggacgtacgtcctgcaggtaaattgcagctgaaggacagtgaagggtgaatttatccatttaaaccattttctttttaacacatttcttatggtaatctcttctcactacactataaaaatggcttctcaatcccattttctacatcatcccattctattgagttttgtttatttgctttcacttttttttttatctgcctcttcccttaatttgcttgacttcttcttcacattttgctttgttttctcctccggcttccggtatttcaaattcaagatgagcaagttgaaatttataaatagaaatacagatattatttacaacgtcaaatctttggtattttcaatatttgaatggggtaaatttgtcatatagtcatcatcactgactacttatctaacctatttaatttggagcatattctttataaggtccctctcacggccaatgtctaattattgatatacagctcttgttttctagtgctgcttataatattatctacacatatatatggtactgcacactactactatatagtagtaagtaaactagcaacagccggggccaaactccaataactaggcattggggtttagttggtaatataaatataacatcaaaaagtctttgcttgtgacgaacatcacaatgcacccaccattgatgccacgacagacattgttaattttttttttaatttttaaaaaagaagcaattccaatagttctatattacaatctcacgtgatccaagcacaacgtttcattttttgtacatgctcgatatataaataatatttcattttatagtaaaatataatgacattttcgaatataatttttgaaatttcattttccaaatgaaatactaatattaatattaatgagattaccacaaatcatgttatgaatgaaataaagagttttggcattctaactttctttgaatagaacaaaatgtatacaacactctccatatatacacgatttattcagggatcatatacattctctcatgattaacatagtctgctttcttcacgtctaagcagataatttttggtccacaagataaaattatcattagtcgttttaattaattccttgagcatcaagcactaaaataattaaacttctccattaccaaaaaaaaaagataggtgattcagtaacatgtagtactagtactactgattttttttttcttttgattttaatgaatggttcgtatcgagcatcgagaaatccatttattaggtgtgtaatgtaatagtagtatttccttgattttcagtaataagatggattcttacatttatatctgtttgacagaaaatgttgtcaatgcatttcttgggcacaaagttttttgaaacatgaattaattttttcaaaatatttatgacatcaaattgaccctaaaataagtgataaagctttaacgtggaatgacattaatttttccatgataaataaaacacttaaaacattttaatattaatattataatcagttacaactatgttcaattaatgcaataacttttaaataaatattaaaatattttttttctgttctccaataaagagatcttgttgcacggaaaaagtcacattcttatttagtaaaaaattataattattgtttgaaaaatatcattttcactgcagaaaatttgatccagctctacagatcatacttttattgtacaataatacaataaaaatattcatctgcaggaaatatcattttcattgtacaataatataaagataaatatataccagaaaagaaaaagaaactgatgtggcacaatgtattcactgaaagaatgcatattgtatttcacctttcaagcagcactaagaatatacttcttttattatacttgtgcatttactcaaccaccctcggtggagtaagaaagaagatagataaaagttttttttgacatttggtgaatctcttaattaaaaaaataaaataatccatttcctttatttaatttcttttttcccatctgtgaaattccaattctgcttcgcgctcctgtctataaattgacttagccaccacctcagtttccattcattcacttcttctctttataccccccctctcttttttgcgttcattctgttttcgtaagtactgttgtttttctcttctatttctttttttgtttgtgttgtttttttttcttccttatcgttgttctgcctctcctctgtttcggtgctctgttcaccacttccacgtgagaatgatcttccttctttgcatgttcattctctcgtgaccactggatcagactccatgttctgatccagggtctctctctaacgcctgtactttcatccatgaccaccttaaaaacaacatgggggtggtgctgttacactaactctgtttctggggtgctgtctttgttcaattttactcagaaaatatcttttcttggattctattcggtgtgtgggaacatgatcctgtcggtcggttgtttttaggttaatccttaactggttacaaggatctaacgcttgaatgcatgtcctgagttaaagaaacaaaagaagaacacacctagtacagcctggcctcgaaccaagaacttctttgttggtttctcattattactaaaataaaataaagtatacgttttcttttttctttgggatgaacggttcagacttatgagaagtttaagctaatcctgtagtggagtgttcaatttattttaaactttaaagcaatagctcaagcactaaacttctttttcaagttcaaccactttggtagcttgctaattgctgctattgttctaattaattaatgtaattattgtttaaaaaagaaaagttggtgacactggaataaaaaagtgtactatctggcaattattcttctgcagcaatgtttgaggttgaaatcttagtagaacaaagtagaagatctggtatttatattttttgtagacagatggtgggggtgggtggtaggccttgaaatccaatatagttttgtagaataattttattattttttttttttgctcacttgtttgtggtattgattttgtgatgactcaagattaatgatttaccttcatttttttcatggtgacatattatgtatattcttgatctgtttcttacacttctttttcgttgttgtagctgttgaagtctgcggccgcaccatggcctg

SEQ ID NO: 52 - DNA, 6647 bp, artificial sequence
  plasmid pKR1964
ctagagtcgactgtttaaacctgcaggcatgcaagcttggcgtaatcatggtcatagctgtttcctgtgtgaaattgttatccgctcacaattccacacaacatacgagccggaagcataaagtgtaaagcctggggtgcctaatgagtgagctaactcacattaattgcgttgcgctcactgcccgctttccagtcgggaaacctgtcgtgccagctgcattaatgaatcggccaacgcgcggggagaggcggtttgcgtattgggcgctcttccgcttcctcgctcactgactcgctgcgctcggtcgttcggctgcggcgagcggtatcagctcactcaaaggcggtaatacggttatccacagaatcaggggataacgcaggaaagaacatgtgagcaaaaggccagcaaaaggccaggaaccgtaaaaaggccgcgttgctggcgtttttccataggctccgcccccctgacgagcatcacaaaaatcgacgctcaagtcagaggtggcgaaacccgacaggactataaagataccaggcgtttccccctggaagctccctcgtgcgctctcctgttccgaccctgccgcttaccggatacctgtccgcctttctcccttcgggaagcgtggcgctttctcatagctcacgctgtaggtatctcagttcggtgtaggtcgttcgctccaagctgggctgtgtgcacgaaccccccgttcagcccgaccgctgcgccttatccggtaactatcgtcttgagtccaacccggtaagacacgacttatcgccactggcagcagccactggtaacaggattagcagagcgaggtatgtaggcggtgctacagagttcttgaagtggtggcctaactacggctacactagaaggacagtatttggtatctgcgctctgctgaagccagttaccttcggaaaaagagttggtagctcttgatccggcaaacaaaccaccgctggtagcggtggtttttttgtttgcaagcagcagattacgcgcagaaaaaaaggatctcaagaagatcctttgatcttttctacggggtctgacgctcagtggaacgaaaactcacgttaagggattttggtcatgagattatcaaaaaggatcttcacctagatccttttaaattaaaaatgaagttttaaatcaatctaaagtatatatgagtaaacttggtctgacagttaccaatgcttaatcagtgaggcacctatctcagcgatctgtctatttcgttcatccatagttgcctgactccccgtcgtgtagataactacgatacgggagggcttaccatctggccccagtgctgcaatgataccgcgagacccacgctcaccggctccagatttatcagcaataaaccagccagccggaagggccgagcgcagaagtggtcctgcaactttatccgcctccatccagtctattaattgttgccgggaagctagagtaagtagttcgccagttaatagtttgcgcaacgttgttgccattgctacaggcatcgtggtgtcacgctcgtcgtttggtatggcttcattcagctccggttcccaacgatcaaggcgagttacatgatcccccatgttgtgcaaaaaagcggttagctccttcggtcctccgatcgttgtcagaagtaagttggccgcagtgttatcactcatggttatggcagcactgcataattctcttactgtcatgccatccgtaagatgcttttctgtgactggtgagtactcaaccaagtcattctgagaatagtgtatgcggcgaccgagttgctcttgcccggcgtcaatacgggataataccgcgccacatagcagaactttaaaagtgctcatcattggaaaacgttcttcggggcgaaaactctcaaggatcttaccgctgttgagatccagttcgatgtaacccactcgtgcacccaactgatcttcagcatcttttactttcaccagcgtttctgggtgagcaaaaacaggaaggcaaaatgccgcaaaaaagggaataagggcgacacggaaatgttgaatactcatactcttcctttttcaatattattgaagcatttatcagggttattgtctcatgagcggatacatatttgaatgtatttagaaaaataaacaaataggggttccgcgcacatttccccgaaaagtgccacctgacgtctaagaaaccattattatcatgacattaacctataaaaataggcgtatcacgaggccctttcgtctcgcgcgtttcggtgatgacggtgaaaacctctgacacatgcagctcccggagacggtcacagcttgtctgtaagcggatgccgggagcagacaagcccgtcagggcgcgtcagcgggtgttggcgggtgtcggggctggcttaactatgcggcatcagagcagattgtactgagagtgcaccatatgcggtgtgaaataccgcacagatgcgtaaggagaaaataccgcatcaggcgccattcgccattcaggctgcgcaactgttgggaagggcgatcggtgcgggcctcttcgctattacgccagctggcgaaagggggatgtgctgcaaggcgattaagttgggtaacgccagggttttcccagtcacgacgttgtaaaacgacggccagtgaattcaggacgtacgtcctgcaggtaaattgcagctgaaggacagtgaagggtgaatttatccatttaaaccattttctttttaacacatttcttatggtaatctcttctcactacactataaaaatggcttctcaatcccattttctacatcatcccattctattgagttttgtttatttgctttcacttttttttttatctgcctcttcccttaatttgcttgacttcttcttcacattttgctttgttttctcctccggcttccggtatttcaaattcaagatgagcaagttgaaatttataaatagaaatacagatattatttacaacgtcaaatctttggtattttcaatatttgaatggggtaaatttgtcatatagtcatcatcactgactacttatctaacctatttaatttggagcatattctttataaggtccctctcacggccaatgtctaattattgatatacagctcttgttttctagtgctgcttataatattatctacacatatatatggtactgcacactactactatatagtagtaagtaaactagcaacagccggggccaaactccaataactaggcattggggtttagttggtaatataaatataacatcaaaaagtctttgcttgtgacgaacatcacaatgcacccaccattgatgccacgacagacattgttaattttttttttaatttttaaaaaagaagcaattccaatagttctatattacaatctcacgtgatccaagcacaacgtttcattttttgtacatgctcgatatataaataatatttcattttatagtaaaatataatgacattttcgaatataatttttgaaatttcattttccaaatgaaatactaatattaatattaatgagattaccacaaatcatgttatgaatgaaataaagagttttggcattctaactttctttgaatagaacaaaatgtatacaacactctccatatatacacgatttattcagggatcatatacattctctcatgattaacatagtctgctttcttcacgtctaagcagataatttttggtccacaagataaaattatcattagtcgttttaattaattccttgagcatcaagcactaaaataattaaacttctccattaccaaaaaaaaaagataggtgattcagtaacatgtagtactagtactactgattttttttttcttttgattttaatgaatggttcgtatcgagcatcgagaaatccatttattaggtgtgtaatgtaatagtagtatttccttgattttcagtaataagatggattcttacatttatatctgtttgacagaaaatgttgtcaatgcatttcttgggcacaaagttttttgaaacatgaattaattttttcaaaatatttatgacatcaaattgaccctaaaataagtgataaagctttaacgtggaatgacattaatttttccatgataaataaaacacttaaaacattttaatattaatattataatcagttacaactatgttcaattaatgcaataacttttaaataaatattaaaatattttttttctgttctccaataaagagatcttgttgcacggaaaaagtcacattcttatttagtaaaaaattataattattgtttgaaaaatatcattttcactgcagaaaatttgatccagctctacagatcatacttttattgtacaataatacaataaaaatattcatctgcaggaaatatcattttcattgtacaataatataaagataaatatataccagaaaagaaaaagaaactgatgtggcacaatgtattcactgaaagaatgcatattgtatttcacctttcaagcagcactaagaatatacttcttttattatacttgtgcatttactcaaccaccctcggtggagtaagaaagaagatagataaaagttttttttgacatttggtgaatctcttaattaaaaaaataaaataatccatttcctttatttaatttcttttttcccatctgtgaaattccaattctgcttcgcgctcctgtctataaattgacttagccaccacctcagtttccattcattcacttcttctctttataccccccctctcttttttgcgttcattctgttttcgtaagtactgttgtttttctcttctatttctttttttgtttgtgttgtttttttttcttccttatcgttgttctgcctctcctctgtttcggtgctctgttcaccacttccacgtgagaatgatcttccttctttgcatgttcattctctcgtgaccactggatcagactccatgttctgatccagggtctctctctaacgcctgtactttcatccatgaccaccttaaaaacaacatgggggtggtgctgttacactaactctgtttctggggtgctgtctttgttcaattttactcagaaaatatcttttcttggattctattcggtgtgtgggaacatgatcctgtcggtcggttgtttttaggttaatccttaactggttacaaggatctaacgcttgaatgcatgtcctgagttaaagaaacaaaagaagaacacacctagtacagcctggcctcgaaccaagaacttctttgttggtttctcattattactaaaataaaataaagtatacgttttcttttttctttgggatgaacggttcagacttatgagaagtttaagctaatcctgtagtggagtgttcaatttattttaaactttaaagcaatagctcaagcactaaacttctttttcaagttcaaccactttggtagcttgctaattgctgctattgttctaattaattaatgtaattattgtttaaaaaagaaaagttggtgacactggaataaaaaagtgtactatctggcaattattcttctgcagcaatgtttgaggttgaaatcttagtagaacaaagtagaagatctggtatttatattttttgtagacagatggtgggggtgggtggtaggccttgaaatccaatatagttttgtagaataattttattattttttttttttgctcacttgtttgtggtattgattttgtgatgactcaagattaatgatttaccttcatttttttcatggtgacatattatgtatattcttgatctgtttcttacacttctttttcgttgttgtagctgttgaagtctgcggccgcatttcgcaccaaatcaatgaaagtaataatgaaaagtctgaataagaatacttaggcttagatgcctttgttacttgtgtaaaataacttgagtcatgtacctttggcggaaacagaataaataaaaggtgaaattccaatgctctatgtataagttagtaatacttaatgtgttctacggttgtttcaatatcatcaaactctaattgaaactttagaaccacaaatctcaatcttttcttaatgaaatgaaaaatcttaattgtaccatgtttatgttaaacaccttacaattaattggttggagaggaggaccaaccgatgggacaacattgggagaaagagattcaatggagatttggataggagaacaacattctttttcacttcaatacaagatgagtgcaacactaaggatatgtatgagactttcagaagctacgacaacatagatgagtgaggtggtgattcctagcaagaaagacattagaggaagccaaaatcgaacaaggaagacatcaagggcaagagacaggaccatccatctcaggaaaaggagctttgggatagtccgagaagttgtacaagaaattttttggagggtgagtgatgcattgctggtgactttaactcaatcaaaattgagaaagaaagaaaagggagggggctcacatgtgaatagaagggaaacgggagaattttacagttttgatctaatgggcatcccagctagtggtaacatattcaccatgtttaaccttcacgtacgt

SEQ ID NO: 53 - DNA, 9266 bp, artificial sequence
  plasmid pKR1965
gtacgtgaaggttaaacatggtgaatatgttaccactagctgggatgcccattagatcaaaactgtaaaattctcccgtttcccttctattcacatgtgagccccctcccttttctttctttctcaattttgattgagttaaagtcaccagcaatgcatcactcaccctccaaaaaatttcttgtacaacttctcggactatcccaaagctccttttcctgagatggatggtcctgtctcttgcccttgatgtcttccttgttcgattttggcttcctctaatgtctttcttgctaggaatcaccacctcactcatctatgttgtcgtagcttctgaaagtctcatacatatccttagtgttgcactcatcttgtattgaagtgaaaaagaatgttgttctcctatccaaatctccattgaatctctttctcccaatgttgtcccatcggttggtcctcctctccaaccaattaattgtaaggtgtttaacataaacatggtacaattaagatttttcatttcattaagaaaagattgagatttgtggttctaaagtttcaattagagtttgatgatattgaaacaaccgtagaacacattaagtattactaacttatacatagagcattggaatttcaccttttatttattctgtttccgccaaaggtacatgactcaagttattttacacaagtaacaaaggcatctaagcctaagtattcttattcagacttttcattattactttcattgatttggtgcgaaatgcggccgcagacttcaacagctacaacaacgaaaaagaagtgtaagaaacagatcaagaatatacataatatgtcaccatgaaaaaaatgaaggtaaatcattaatcttgagtcatcacaaaatcaataccacaaacaagtgagcaaaaaaaaaaaataataaaattattctacaaaactatattggatttcaaggcctaccacccacccccaccatctgtctacaaaaaatataaataccagatcttctactttgttctactaagatttcaacctcaaacattgctgcagaagaataattgccagatagtacacttttttattccagtgtcaccaacttttcttttttaaacaataattacattaattaattagaacaatagcagcaattagcaagctaccaaagtggttgaacttgaaaaagaagtttagtgcttgagctattgctttaaagtttaaaataaattgaacactccactacaggattagcttaaacttctcataagtctgaaccgttcatcccaaagaaaaaagaaaacgtatactttattttattttagtaataatgagaaaccaacaaagaagttcttggttcgaggccaggctgtactaggtgtgttcttcttttgtttctttaactcaggacatgcattcaagcgttagatccttgtaaccagttaaggattaacctaaaaacaaccgaccgacaggatcatgttcccacacaccgaatagaatccaagaaaagatattttctgagtaaaattgaacaaagacagcaccccagaaacagagttagtgtaacagcaccacccccatgttgtttttaaggtggtcatggatgaaagtacaggcgttagagagagaccctggatcagaacatggagtctgatccagtggtcacgagagaatgaacatgcaaagaaggaagatcattctcacgtggaagtggtgaacagagcaccgaaacagaggagaggcagaacaacgataaggaagaaaaaaaaacaacacaaacaaaaaaagaaatagaagagaaaaacaacagtacttacgaaaacagaatgaacgcaaaaaagagagggggggtataaagagaagaagtgaatgaatggaaactgaggtggtggctaagtcaatttatagacaggagcgcgaagcagaattggaatttcacagatgggaaaaaagaaattaaataaaggaaatggattattttatttttttaattaagagattcaccaaatgtcaaaaaaaacttttatctatcttctttcttactccaccgagggtggttgagtaaatgcacaagtataataaaagaagtatattcttagtgctgcttgaaaggtgaaatacaatatgcattctttcagtgaatacattgtgccacatcagtttctttttcttttctggtatatatttatctttatattattgtacaatgaaaatgatatttcctgcagatgaatatttttattgtattattgtacaataaaagtatgatctgtagagctggatcaaattttctgcagtgaaaatgatatttttcaaacaataattataattttttactaaataagaatgtgactttttccgtgcaacaagatctctttattggagaacagaaaaaaaatattttaatatttatttaaaagttattgcattaattgaacatagttgtaactgattataatattaatattaaaatgttttaagtgttttatttatcatggaaaaattaatgtcattccacgttaaagctttatcacttattttagggtcaatttgatgtcataaatattttgaaaaaattaattcatgtttcaaaaaactttgtgcccaagaaatgcattgacaacattttctgtcaaacagatataaatgtaagaatccatcttattactgaaaatcaaggaaatactactattacattacacacctaataaatggatttctcgatgctcgatacgaaccattcattaaaatcaaaagaaaaaaaaaatcagtagtactagtactacatgttactgaatcacctatcttttttttttggtaatggagaagtttaattattttagtgcttgatgctcaaggaattaattaaaacgactaatgataattttatcttgtggaccaaaaattatctgcttagacgtgaagaaagcagactatgttaatcatgagagaatgtatatgatccctgaataaatcgtgtatatatggagagtgttgtatacattttgttctattcaaagaaagttagaatgccaaaactctttatttcattcataacatgatttgtggtaatctcattaatattaatattagtatttcatttggaaaatgaaatttcaaaaattatattcgaaaatgtcattatattttactataaaatgaaatattatttatatatcgagcatgtacaaaaaatgaaacgttgtgcttggatcacgtgagattgtaatatagaactattggaattgcttcttttttaaaaattaaaaaaaaaattaacaatgtctgtcgtggcatcaatggtgggtgcattgtgatgttcgtcacaagcaaagactttttgatgttatatttatattaccaactaaaccccaatgcctagttattggagtttggccccggctgttgctagtttacttactactatatagtagtagtgtgcagtaccatatatatgtgtagataatattataagcagcactagaaaacaagagctgtatatcaataattagacattggccgtgagagggaccttataaagaatatgctccaaattaaataggttagataagtagtcagtgatgatgactatatgacaaatttaccccattcaaatattgaaaataccaaagatttgacgttgtaaataatatctgtatttctatttataaatttcaacttgctcatcttgaatttgaaataccggaagccggaggagaaaacaaagcaaaatgtgaagaagaagtcaagcaaattaagggaagaggcagataaaaaaaaaagtgaaagcaaataaacaaaactcaatagaatgggatgatgtagaaaatgggattgagaagccatttttatagtgtagtgagaagagattaccataagaaatgtgttaaaaagaaaatggtttaaatggataaattcacccttcactgtccttcagctgcaatttacctgcaggacgtacggatccgtcgacggcgcgcccgatcatccggatatagttcctcctttcagcaaaaaacccctcaagacccgtttagaggccccaaggggttatgctagttattgctcagcggtggcagcagccaactcagcttcctttcgggctttgttagcagccggatcgatccaagctgtacctcactattcctttgccctcggacgagtgctggggcgtcggtttccactatcggcgagtacttctacacagccatcggtccagacggccgcgcttctgcgggcgatttgtgtacgcccgacagtcccggctccggatcggacgattgcgtcgcatcgaccctgcgcccaagctgcatcatcgaaattgccgtcaaccaagctctgatagagttggtcaagaccaatgcggagcatatacgcccggagccgcggcgatcctgcaagctccggatgcctccgctcgaagtagcgcgtctgctgctccatacaagccaaccacggcctccagaagaagatgttggcgacctcgtattgggaatccccgaacatcgcctcgctccagtcaatgaccgctgttatgcggccattgtccgtcaggacattgttggagccgaaatccgcgtgcacgaggtgccggacttcggggcagtcctcggcccaaagcatcagctcatcgagagcctgcgcgacggacgcactgacggtgtcgtccatcacagtttgccagtgatacacatggggatcagcaatcgcgcatatgaaatcacgccatgtagtgtattgaccgattccttgcggtccgaatgggccgaacccgctcgtctggctaagatcggccgcagcgatcgcatccatagcctccgcgaccggctgcagaacagcgggcagttcggtttcaggcaggtcttgcaacgtgacaccctgtgcacggcgggagatgcaataggtcaggctctcgctgaattccccaatgtcaagcacttccggaatcgggagcgcggccgatgcaaagtgccgataaacataacgatctttgtagaaaccatcggcgcagctatttacccgcaggacatatccacgccctcctacatcgaagctgaaagcacgagattcttcgccctccgagagctgcatcaggtcggagacgctgtcgaacttttcgatcagaaacttctcgacagacgtcgcggtgagttcaggcttttccatgggtatatctccttcttaaagttaaacaaaattatttctagagggaaaccgttgtggtctccctatagtgagtcgtattaatttcgcgggatcgagatcgatccaattccaatcccacaaaaatctgagcttaacagcacagttgctcctctcagagcagaatcgggtattcaacaccctcatatcaactactacgttgtgtataacggtccacatgccggtatatacgatgactggggttgtacaaaggcggcaacaaacggcgttcccggagttgcacacaagaaatttgccactattacagaggcaagagcagcagctgacgcgtacacaacaagtcagcaaacagacaggttgaacttcatccccaaaggagaagctcaactcaagcccaagagctttgctaaggccctaacaagcccaccaaagcaaaaagcccactggctcacgctaggaaccaaaaggcccagcagtgatccagccccaaaagagatctcctttgccccggagattacaatggacgatttcctctatctttacgatctaggaaggaagttcgaaggtgaaggtgacgacactatgttcaccactgataatgagaaggttagcctcttcaatttcagaaagaatgctgacccacagatggttagagaggcctacgcagcaggtctcatcaagacgatctacccgagtaacaatctccaggagatcaaataccttcccaagaaggttaaagatgcagtcaaaagattcaggactaattgcatcaagaacacagagaaagacatatttctcaagatcagaagtactattccagtatggacgattcaaggcttgcttcataaaccaaggcaagtaatagagattggagtctctaaaaaggtagttcctactgaatctaaggccatgcatggagtctaagattcaaatcgaggatctaacagaactcgccgtgaagactggcgaacagttcatacagagtcttttacgactcaatgacaagaagaaaatcttcgtcaacatggtggagcacgacactctggtctactccaaaaatgtcaaagatacagtctcagaagaccaaagggctattgagacttttcaacaaaggataatttcgggaaacctcctcggattccattgcccagctatctgtcacttcatcgaaaggacagtagaaaaggaaggtggctcctacaaatgccatcattgcgataaaggaaaggctatcattcaagatgcctctgccgacagtggtcccaaagatggacccccacccacgaggagcatcgtggaaaaagaagacgttccaaccacgtcttcaaagcaagtggattgatgtgacatctccactgacgtaagggatgacgcacaatcccactatccttcgcaagacccttcctctatataaggaagttcatttcatttggagaggacacgctcgagctcatttctctattacttcagccataacaaaagaactcttttctcttcttattaaaccatgaaaaagcctgaactcaccgcgacgtctgtcgagaagtttctgatcgaaaagttcgacagcgtctccgacctgatgcagctctcggagggcgaagaatctcgtgctttcagcttcgatgtaggagggcgtggatatgtcctgcgggtaaatagctgcgccgatggtttctacaaagatcgttatgtttatcggcactttgcatcggccgcgctcccgattccggaagtgcttgacattggggaattcagcgagagcctgacctattgcatctcccgccgtgcacagggtgtcacgttgcaagacctgcctgaaaccgaactgcccgctgttctgcagccggtcgcggaggccatggatgcgatcgctgcggccgatcttagccagacgagcgggttcggcccattcggaccgcaaggaatcggtcaatacactacatggcgtgatttcatatgcgcgattgctgatccccatgtgtatcactggcaaactgtgatggacgacaccgtcagtgcgtccgtcgcgcaggctctcgatgagctgatgctttgggccgaggactgccccgaagtccggcacctcgtgcacgcggatttcggctccaacaatgtcctgacggacaatggccgcataacagcggtcattgactggagcgaggcgatgttcggggattcccaatacgaggtcgccaacatcttcttctggaggccgtggttggcttgtatggagcagcagacgcgctacttcgagcggaggcatccggagcttgcaggatcgccgcggctccgggcgtatatgctccgcattggtcttgaccaactctatcagagcttggttgacggcaatttcgatgatgcagcttgggcgcagggtcgatgcgacgcaatcgtccgatccggagccgggactgtcgggcgtacacaaatcgcccgcagaagcgcggccgtctggaccgatggctgtgtagaagtactcgccgatagtggaaaccgacgccccagcactcgtccgagggcaaaggaatagtgaggtacctaaagaaggagtgcgtcgaagcagatcgttcaaacatttggcaataaagtttcttaagattgaatcctgttgccggtcttgcgatgattatcatataatttctgttgaattacgttaagcatgtaataattaacatgtaatgcatgacgttatttatgagatgggtttttatgattagagtcccgcaattatacatttaatacgcgatagaaaacaaaatatagcgcgcaaactaggataaattatcgcgcgcggtgtcatctatgttactagatcgatgtcgaatcgatcaacctgcattaatgaatcggccaacgcgcggggagaggcggtttgcgtattgggcgctcttccgcttcctcgctcactgactcgctgcgctcggtcgttcggctgcggcgagcggtatcagctcactcaaaggcggtaatacggttatccacagaatcaggggataacgcaggaaagaacatgtgagcaaaaggccagcaaaaggccaggaaccgtaaaaaggccgcgttgctggcgtttttccataggctccgcccccctgacgagcatcacaaaaatcgacgctcaagtcagaggtggcgaaacccgacaggactataaagataccaggcgtttccccctggaagctccctcgtgcgctctcctgttccgaccctgccgcttaccggatacctgtccgcctttctcccttcgggaagcgtggcgctttctcaatgctcacgctgtaggtatctcagttcggtgtaggtcgttcgctccaagctgggctgtgtgcacgaaccccccgttcagcccgaccgctgcgccttatccggtaactatcgtcttgagtccaacccggtaagacacgacttatcgccactggcagcagccactggtaacaggattagcagagcgaggtatgtaggcggtgctacagagttcttgaagtggtggcctaactacggctacactagaaggacagtatttggtatctgcgctctgctgaagccagttaccttcggaaaaagagttggtagctcttgatccggcaaacaaaccaccgctggtagcggtggtttttttgtttgcaagcagcagattacgcgcagaaaaaaaggatctcaagaagatcctttgatcttttctacggggtctgacgctcagtggaacgaaaactcacgttaagggattttggtcatgacattaacctataaaaataggcgtatcacgaggccctttcgtctcgcgcgtttcggtgatgacggtgaaaacctctgacacatgcagctcccggagacggtcacagcttgtctgtaagcggatgccgggagcagacaagcccgtcagggcgcgtcagcgggtgttggcgggtgtcggggctggcttaactatgcggcatcagagcagattgtactgagagtgcaccatatggacatattgtcgttagaacgcggctacaattaatacataaccttatgtatcatacacatacgatttaggtgacactatagaacggcgcgccaagcttggatctcctgcaggatctggccggccggatctc

SEQ ID NO: 54 - DNA, 1768 bp, Glycine max
gcacgagctctcttataatcacacacacacctaccttaatagctatggaaactggaggctttcacggctaccgcaagctccccaacaccaccgctgggttgaagctgtcagtgtcagacatgaacatgaggcagcaggtagcatcatcagatcacagtgcagccacaggagaggagaacgaatgcacggtgagggagcaagacaggttcatgccaatcgccaacgtgattaggatcatgcgcaagattctccctccacacgcaaaaatctcggacgatgcaaaagaaacaatccaagagtgcgtgtctgagtacatcagcttcatcacaggtgaggcgaacgagcgttgccagagggagcagcggaagaccataaccgcagaggacgtgctttgggccatgagcaagcttggattcgacgactacatcgaaccgttgaccatgtaccttcaccgctaccgtgaacttgagggtgaccgcacctctatgaggggtgaaccactcgggaagaggactgtggaatacgccacgcttggtgttgctactgcttttgtccctccaccctatcatcaccacaatgggtactttggtgctgccatgcccatggggacttacgttagggaagcgccaccaaatacagcctcctcccatcaccaccaccaccaccaccaccaccatgctcgtggaatctccaatgctcatgaaccaaatgctcgctccatataaaattatataattatgactaggattcagaacaagacttgatgatgattagcttaactctcagtaattggtgctagagtactactgttgttgaggatactttattttataattaagggctgggaagggagttagtatattcctaatcctaactatgtgcatctttaatttatgaaatcactttgttttaacctttgatgaaaaaaaaaaaaaaaaaaaactcgagactagttctccgtttctcgccaaacaaacacaaaatggctgccttcagcggcgacgaaaccgcacctttctttggcttcctcggagccgccgctgccctcgttttttcctgtatgggagcggcgtacggaaccgcgaagagcggcgtcggggttgcgtcgatgggcgtgatgaggccggagctggtgatgaaatcgatcgtgccggttgtgatggctggtgtgttgggtatctacggtttgatcattgcggttatcataagtacgggcattaaccctaaggccaaatcgtactatctttttgacggctacgcccacctctcttcaggtctcgcttgtggcctcgctggcctctccgctggcatggccatcggcatcgttggcgatgccggtgttagagcaaatgctcagcagccaaagctttttgttggaatgatactcatcctcatttttgctgaggcgttggcattatacggtctcattgttggcatcatcctctcttctcgtgctggccaatccagggctgactaataaattttcctgttggatgccacagattgtgaatgttactgtgaagtccgggtgggtaatgttagtacacagctgccgctttggcttgctcaagtgattctatttatgtttacattataaaattgaggctatccaggaagaaagtcagtcgaactttccttagcccttcattatttttagttatatgctcaatccagactagaatagagatctccataataagacagatgtatgttttgattccatttactttcaatattgttttccactcttcaaaaaaaaaaaaaaaaa

SEQ ID NO: 55 - DNA, 681 bp, Glycine max
atggaaactggaggctttcacggctaccgcaagctccccaacaccaccgctgggttgaagctgtcagtgtcagacatgaacatgaggcagcaggtagcatcatcagatcacagtgcagccacaggagaggagaacgaatgcacggtgagggagcaagacaggttcatgccaatcgccaacgtgattaggatcatgcgcaagattctccctccacacgcaaaaatctcggacgatgcaaaagaaacaatccaagagtgcgtgtctgagtacatcagcttcatcacaggtgaggcgaacgagcgttgccagagggagcagcggaagaccataaccgcagaggacgtgctttgggccatgagcaagcttggattcgacgactacatcgaaccgttgaccatgtaccttcaccgctaccgtgaacttgagggtgaccgcacctctatgaggggtgaaccactcgggaagaggactgtggaatacgccacgcttggtgttgctactgcttttgtccctccaccctatcatcaccacaatgggtactttggtgctgccatgcccatggggacttacgttagggaagcgccaccaaatacagcctcctcccatcaccaccaccaccaccaccaccaccatgctcgtggaatctccaatgctcatgaaccaaatgctcgctccatataa

SEQ ID NO: 56 - protein, 226 aa, Glycine max
METGGFHGYRKLPNTTAGLKLSVSDMNMRQQVASSDHSAATGEENECTVREQDRFMPIANVIRIMRKILPPHAKISDDAKETIQECVSEYISFITGEANERCQREQRKTITAEDVLWAMSKLGFDDYIEPLTMYLHRYRELEGDRTSMRGEPLGKRTVEYATLGVATAFVPPPYHHHNGYFGAAMPMGTYVREAPPNTASSHHHHHHHHHHARGISNAHEPNARSI

SEQ ID NO: 57 - DNA, 1135 bp, Glycine max
gcacgagggaaactggaggctttcatggctaccgcaagctccccaacacaacctctgggttgaagctgtcagtgtcagacatgaacatgaacatgaggcagcagcaggtagcatcatcagatcagaactgcagcaaccacagtgcagcaggagaggagaacgaatgcacggtgagggagcaagacaggttcatgccaatcgctaacgtgatacggatcatgcgcaagattctccctccacacgcaaaaatctccgatgatgcaaaggagacaatccaagagtgcgtgtcggagtacatcagcttcatcaccggggaggccaacgagcgttgccagagggagcagcgcaagaccataaccgcagaggacgtgctttgggcaatgagtaagcttggattcgacgactacatcgaaccgttaaccatgtaccttcaccgctaccgtgagctggagggtgaccgcacctctatgaggggtgaaccgctcgggaagaggactgtggaatatgccacgcttgctactgcttttgtgccgccaccctttcatcaccacaatggctactttggtgctgccatgcccatggggacttacgttagggaaacgccaccaaatgctgcgtcatctcatcaccatcatggaatctccaatgctcatgaaccaaatgctcgctccatataaaattaatgaagagtactgttcagtaggagaacaagacttcttggacttgattagcttaactctcagtgattggtgttagagtactgttgttgaggatggttaattttataattaagggctgggaattggggagttagtatatattcctaatcctaattatgtgcatctttaatttatggaataactttgttttttgttttaacttctgataatttggattttctgatgtttaatgtggttttgtctatcccttattaacagtgccaagcttaaggttttagccatgctccaaaatggaatacttgtactgttatgttgttctggtagtgatggtgatgaaacctgcaagttatgtttatgtataaagccactattgatcaaaattagagaaattatcatttaataagtatcctcccatgttaattttaaaaaaaaaaaaaaaaaactcgagaccggca

SEQ ID NO: 58 - DNA, 678 bp, Glycine max
atggaaactggaggctttcatggctaccgcaagctccccaacacaacctctgggttgaagctgtcagtgtcagacatgaacatgaacatgaggcagcagcaggtagcatcatcagatcagaactgcagcaaccacagtgcagcaggagaggagaacgaatgcacggtgagggagcaagacaggttcatgccaatcgctaacgtgatacggatcatgcgcaagattctccctccacacgcaaaaatctccgatgatgcaaaggagacaatccaagagtgcgtgtcggagtacatcagcttcatcaccggggaggccaacgagcgttgccagagggagcagcgcaagaccataaccgcagaggacgtgctttgggcaatgagtaagcttggattcgacgactacatcgaaccgttaaccatgtaccttcaccgctaccgtgagctggagggtgaccgcacctctatgaggggtgaaccgctcgggaagaggactgtggaatatgccacgcttgctactgcttttgtgccgccaccctttcatcaccacaatggctactttggtgctgccatgcccatggggacttacgttagggaaacgccaccaaatgctgcgtcatctcatcaccatcatggaatctccaatgctcatgaaccaaatgctcgctccatacgctccata

SEQ ID NO: 59 - protein, 223 aa, Glycine max
METGGFHGYRKLPNTTSGLKLSVSDMNMNMRQQQVASSDQNCSNHSAAGEENECTVREQDRFMPIANVIRIMRKILPPHAKISDDAKETIQECVSEYISFITGEANERCQREQRKTITAEDVLWAMSKLGFDDYIEPLTMYLHRYRELEGDRTSMRGEPLGKRTVEYATLATAFVPPPFHHHNGYFGAAMPMGTYVRETPPNAASSHHHHGISNAHEPNARSI

SEQ ID NO: 60 - DNA, 24 bp, artificial sequence
  primer SA275
atggaaactggaggctttcacggc

SEQ ID NO: 61 - DNA, 24 bp, artificial sequence
  primer SA276
ttatatggagcgagcatttggttc

SEQ ID NO: 62 - DNA, 3519 bp, artificial sequence
  plasmid
aagggcgaattcgacccagctttcttgtacaaagttggcattataaaaaataattgctcatcaatttgttgcaacgaacaggtcactatcagtcaaaataaaatcattatttgccatccagctgatatcccctatagtgagtcgtattacatggtcatagctgtttcctggcagctctggcccgtgtctcaaaatctctgatgttacattgcacaagataaaaatatatcatcatgcctcctctagaccagccaggacagaaatgcctcgacttcgctgctgcccaaggttgccgggtgacgcacaccgtggaaacggatgaaggcacgaacccagtggacataagcctgttcggttcgtaagctgtaatgcaagtagcgtatgcgctcacgcaactggtccagaaccttgaccgaacgcagcggtggtaacggcgcagtggcggttttcatggcttgttatgactgtttttttggggtacagtctatgcctcgggcatccaagcagcaagcgcgttacgccgtgggtcgatgtttgatgttatggagcagcaacgatgttacgcagcagggcagtcgccctaaaacaaagttaaacatcatgagggaagcggtgatcgccgaagtatcgactcaactatcagaggtagttggcgtcatcgagcgccatctcgaaccgacgttgctggccgtacatttgtacggctccgcagtggatggcggcctgaagccacacagtgatattgatttgctggttacggtgaccgtaaggcttgatgaaacaacgcggcgagctttgatcaacgaccttttggaaacttcggcttcccctggagagagcgagattctccgcgctgtagaagtcaccattgttgtgcacgacgacatcattccgtggcgttatccagctaagcgcgaactgcaatttggagaatggcagcgcaatgacattcttgcaggtatcttcgagccagccacgatcgacattgatctggctatcttgctgacaaaagcaagagaacatagcgttgccttggtaggtccagcggcggaggaactctttgatccggttcctgaacaggatctatttgaggcgctaaatgaaaccttaacgctatggaactcgccgcccgactgggctggcgatgagcgaaatgtagtgcttacgttgtcccgcatttggtacagcgcagtaaccggcaaaatcgcgccgaaggatgtcgctgccgactgggcaatggagcgcctgccggcccagtatcagcccgtcatacttgaagctagacaggcttatcttggacaagaagaagatcgcttggcctcgcgcgcagatcagttggaagaatttgtccactacgtgaaaggcgagatcaccaaggtagtcggcaaataaccctcgagccacccatgaccaaaatcccttaacgtgagttacgcgtcgttccactgagcgtcagaccccgtagaaaagatcaaaggatcttcttgagatcctttttttctgcgcgtaatctgctgcttgcaaacaaaaaaaccaccgctaccagcggtggtttgtttgccggatcaagagctaccaactctttttccgaaggtaactggcttcagcagagcgcagataccaaatactgtccttctagtgtagccgtagttaggccaccacttcaagaactctgtagcaccgcctacatacctcgctctgctaatcctgttaccagtggctgctgccagtggcgataagtcgtgtcttaccgggttggactcaagacgatagttaccggataaggcgcagcggtcgggctgaacggggggttcgtgcacacagcccagcttggagcgaacgacctacaccgaactgagatacctacagcgtgagcattgagaaagcgccacgcttcccgaagggagaaaggcggacaggtatccggtaagcggcagggtcggaacaggagagcgcacgagggagcttccagggggaaacgcctggtatctttatagtcctgtcgggtttcgccacctctgacttgagcgtcgatttttgtgatgctcgtcaggggggcggagcctatggaaaaacgccagcaacgcggcctttttacggttcctggccttttgctggccttttgctcacatgttctttcctgcgttatcccctgattctgtggataaccgtattaccgcctttgagtgagctgataccgctcgccgcagccgaacgaccgagcgcagcgagtcagtgagcgaggaagcggaagagcgcccaatacgcaaaccgcctctccccgcgcgttggccgattcattaatgcagctggcacgacaggtttcccgactggaaagcgggcagtgagcgcaacgcaattaatacgcgtaccgctagccaggaagagtttgtagaaacgcaaaaaggccatccgtcaggatggccttctgcttagtttgatgcctggcagtttatggcgggcgtcctgcccgccaccctccgggccgttgcttcacaacgttcaaatccgctcccggcggatttgtcctactcaggagagcgttcaccgacaaacaacagataaaacgaaaggcccagtcttccgactgagcctttcgttttatttgatgcctggcagttccctactctcgcgttaacgctagcatggatgttttcccagtcacgacgttgtaaaacgacggccagtcttaagctcgggccccaaataatgattttattttgactgatagtgacctgttcgttgcaacaaattgatgagcaatgcttttttataatgccaactttgtacaaaaaagcaggctccgaattcgcccttatggaaactggaggctttcacggctaccgcaagctccccaacaccaccgctgggttgaagctgtcagtgtcagacatgaacatgaacatgaggcagcagcaggtagcatcatcagatcagaactgcagcaaccacagtgcagcaggagaggagaacgaatgcacggtgagggagcaagacaggttcatgccaatcgctaacgtgatacggatcatgcgcaagattctccctccacacgcaaaaatctccgatgatgcaaaggagacaatccaagagtgcgtgtcggagtacatcagcttcatcaccggggaggcgaacgagcgttgccagagggagcaacggaagaccataaccgcagaggacgtgctttgggccatgagcaagcttggattcgacgactacatcgaaccgttgaccatgtaccttcaccgctaccgtgaacttgagggtgaccgcacctctatgaggggtgaaccactcgggaagaggactgtggaatacgccacgcttggtgttgctactgcttttgtccctccaccctatcatcaccacaatgggtactttggtgctgccatgcccatggggacttacgttagggaagcgccaccaaatacagcctcctcccatcaccaccaccaccaccaccaccaccatgctcgtggaatctccaatgctcatgaaccaaatgctcgctccatataa

SEQ ID NO: 63 - DNA, 702 bp, Glycine max
atggaaactggaggctttcacggctaccgcaagctccccaacaccaccgctgggttgaagctgtcagtgtcagacatgaacatgaacatgaggcagcagcaggtagcatcatcagatcagaactgcagcaaccacagtgcagcaggagaggagaacgaatgcacggtgagggagcaagacaggttcatgccaatcgctaacgtgatacggatcatgcgcaagattctccctccacacgcaaaaatctccgatgatgcaaaggagacaatccaagagtgcgtgtcggagtacatcagcttcatcaccggggaggcgaacgagcgttgccagagggagcaacggaagaccataaccgcagaggacgtgctttgggccatgagcaagcttggattcgacgactacatcgaaccgttgaccatgtaccttcaccgctaccgtgaacttgagggtgaccgcacctctatgaggggtgaaccactcgggaagaggactgtggaatacgccacgcttggtgttgctactgcttttgtccctccaccctatcatcaccacaatgggtactttggtgctgccatgcccatggggacttacgttagggaagcgccaccaaatacagcctcctcccatcaccaccaccaccaccaccaccaccatgctcgtggaatctccaatgctcatgaaccaaatgctcgctccatataa

SEQ ID NO: 64 - protein, 233 aa, Glycine max
METGGFHGYRKLPNTTAGLKLSVSDMNMNMRQQQVASSDQNCSNHSAAGEENECTVREQDRFMPIANVIRIMRKILPPHAKISDDAKETIQECVSEYISFITGEANERCQREQRKTITAEDVLWAMSKLGFDDYIEPLTMYLHRYRELEGDRTSMRGEPLGKRTVEYATLGVATAFVPPPYHHHNGYFGAAMPMGTYVREAPPNTASSHHHHHHHHHHARGISNAHEPNARSI

SEQ ID NO: 65 - DNA, 40 bp, artificial sequence
  primer Gmlec-5
agcggccgcaccatggaaactggaggctttcacggctacc

SEQ ID NO: 66 - DNA, 39 bp, artificial sequence
  primer Gmlec-3
tgcggccgcttatatggagcgagcatttggttcatgagc

SEQ ID NO: 67 - DNA, 4235 bp, artificial sequence
  plasmid pLF275
cctgaattccagcacactggcggccgttactagtggatccgagctcggtaccaagcttgatgcatagcttgagtattctaacgcgtcacctaaatagcttggcgtaatcatggtcatagctgtttcctgtgtgaaattgttatccgctcacaattccacacaacatacgagccggaagcataaagtgtaaagcctggggtgcctaatgagtgagctaactcacattaattgcgttgcgctcactgcccgctttccagtcgggaaacctgtcgtgccagctgcattaatgaatcggccaacgcgcggggagaggcggtttgcgtattgggcgctcttccgcttcctcgctcactgactcgctgcgctcggtcgttcggctgcggcgagcggtatcagctcactcaaaggcggtaatacggttatccacagaatcaggggataacgcaggaaagaacatgtgagcaaaaggccagcaaaaggccaggaaccgtaaaaaggccgcgttgctggcgtttttccataggctccgcccccctgacgagcatcacaaaaatcgacgctcaagtcagaggtggcgaaacccgacaggactataaagataccaggcgtttccccctggaagctccctcgtgcgctctcctgttccgaccctgccgcttaccggatacctgtccgcctttctcccttcgggaagcgtggcgctttctcatagctcacgctgtaggtatctcagttcggtgtaggtcgttcgctccaagctgggctgtgtgcacgaaccccccgttcagcccgaccgctgcgccttatccggtaactatcgtcttgagtccaacccggtaagacacgacttatcgccactggcagcagccactggtaacaggattagcagagcgaggtatgtaggcggtgctacagagttcttgaagtggtggcctaactacggctacactagaagaacagtatttggtatctgcgctctgctgaagccagttaccttcggaaaaagagttggtagctcttgatccggcaaacaaaccaccgctggtagcggtggtttttttgtttgcaagcagcagattacgcgcagaaaaaaaggatctcaagaagatcctttgatcttttctacggggtctgacgctcagtggaacgaaaactcacgttaagggattttggtcatgagattatcaaaaaggatcttcacctagatccttttaaattaaaaatgaagttttagcacgtgtcagtcctgctcctcggccacgaagtgcacgcagttgccggccgggtcgcgcagggcgaactcccgcccccacggctgctcgccgatctcggtcatggccggcccggaggcgtcccggaagttcgtggacacgacctccgaccactcggcgtacagctcgtccaggccgcgcacccacacccaggccagggtgttgtccggcaccacctggtcctggaccgcgctgatgaacagggtcacgtcgtcccggaccacaccggcgaagtcgtcctccacgaagtcccgggagaacccgagccggtcggtccagaactcgaccgctccggcgacgtcgcgcgcggtgagcaccggaacggcactggtcaacttggccatggtggccctcctcacgtgctattattgaagcatttatcagggttattgtctcatgagcggatacatatttgaatgtatttagaaaaataaacaaataggggttccgcgcacatttccccgaaaagtgccacctgatgcggtgtgaaataccgcacagatgcgtaaggagaaaataccgcatcaggaaattgtaagcgttaataattcagaagaactcgtcaagaaggcgatagaaggcgatgcgctgcgaatcgggagcggcgataccgtaaagcacgaggaagcggtcagcccattcgccgccaagctcttcagcaatatcacgggtagccaacgctatgtcctgatagcggtccgccacacccagccggccacagtcgatgaatccagaaaagcggccattttccaccatgatattcggcaagcaggcatcgccatgggtcacgacgagatcctcgccgtcgggcatgctcgccttgagcctggcgaacagttcggctggcgcgagcccctgatgctcttcgtccagatcatcctgatcgacaagaccggcttccatccgagtacgtgctcgctcgatgcgatgtttcgcttggtggtcgaatgggcaggtagccggatcaagcgtatgcagccgccgcattgcatcagccatgatggatactttctcggcaggagcaaggtgagatgacaggagatcctgccccggcacttcgcccaatagcagccagtcccttcccgcttcagtgacaacgtcgagcacagctgcgcaaggaacgcccgtcgtggccagccacgatagccgcgctgcctcgtcttgcagttcattcagggcaccggacaggtcggtcttgacaaaaagaaccgggcgcccctgcgctgacagccggaacacggcggcatcagagcagccgattgtctgttgtgcccagtcatagccgaatagcctctccacccaagcggccggagaacctgcgtgcaatccatcttgttcaatcatgcgaaacgatcctcatcctgtctcttgatcagagcttgatcccctgcgccatcagatccttggcggcaagaaagccatccagtttactttgcagggcttcccaaccttaccagagggcgccccagctggcaattccggttcgcttgctgtccataaaaccgcccagtctagctatcgccatgtaagcccactgcaagctacctgctttctctttgcgcttgcgttttcccttgtccagatagcccagtagctgacattcatccggggtcagcaccgtttctgcggactggctttctacgtgaaaaggatctaggtgaagatcctttttgataatctcatgcctgacatttatattccccagaacatcaggttaatggcgtttttgatgtcattttcgcggtggctgagatcagccacttcttccccgataacggagaccggcacactggccatatcggtggtcatcatgcgccagctttcatccccgatatgcaccaccgggtaaagttcacgggagactttatctgacagcagacgtgcactggccagggggatcaccatccgtcgccccggcgtgtcaataatatcactctgtacatccacaaacagacgataacggctctctcttttataggtgtaaaccttaaactgccgtacgtataggctgcgcaactgttgggaagggcgatcggtgcgggcctcttcgctattacgccagctggcgaaagggggatgtgctgcaaggcgattaagttgggtaacgccagggttttcccagtcacgacgttgtaaaacgacggccagtgaattgtaatacgactcactatagggcgaattgggccctctagatgcatgctcgagcggccgccagtgtgatggatatctgcagaattcaggtgcggccgcttatatggagcgagcatttggttcatgagcattggagattccacgagcatggtggtggtggtggtggtggtggtgatgggaggaggctgtatttggtggcgcttccctaacgtaagtccccatgggcatggcagcaccaaagtacccattgtggtgatgatagggtggagggacaaaagcagtagcaacaccaagcgtggcgtattccacagtcctcttcccgagtggttcacccctcatagaggtgcggtcaccctcaagttcacggtagcggtgaaggtacatggtcaacggttcgatgtagtcgtcgaatccaagcttgctcatggcccaaagcacgtcctctgcggttatggtcttccgttgctccctctggcaacgctcgttcgcctccccggtgatgaagctgatgtactccgacacgcactcttggattgtctcctttgcatcatcggagatttttgcgtgtggagggagaatcttgcgcatgatccgtatcacgttagcgattggcatgaacctgtcttgctccctcaccgtgcattcgttctcctctcctgctgcactgtggttgctgcagttctgatctgatgatgctacctgctgctgcctcatgttcatgttcatgtctgacactgacagcttcaacccagcggtggtgttggggagcttgcggtagccgtgaaagcctccagtttccatggtgcggccgct

SEQ ID NO: 68 - DNA, 1239 bp, Glycine max
atgaagaggtctccagcatcttcttgttcatcatctacttcctctgttgggtttgaagctcccattgaaaaaagaaggcctaagcatccaaggaggaataatttgaagtcacaaaaatgcaagcagaaccaaaccaccactggtggcagaagaagctctatctatagaggagttacaaggcataggtggacagggaggtttgaagctcacctatgggataagagctcttggaacaacattcagagcaagaagggtcgacaagtttatttgggggcatatgatactgaagaatctgcagcccgtacctatgaccttgcagcccttaaatactggggaaaagatgcaaccctgaatttcccgatagaaacttataccaaggagctcgaggaaatggacaaggtttcaagagaagaatatttggcttctttgcggcgccaaagcagtggcttttctagaggcctgtctaagtaccgtggggttgctaggcatcatcataatggtcgctgggaagcacgaattggaagagtatgcggaaacaagtacctctacttggggacatataaaactcaagaggaggcagcagtggcatatgacatggcagcaatagagtaccgtggagtcaatgcagtgaccaattttgacataagcaactacatggacaaaataaagaagaaaaatgaccaaacccaacaacaacaaacagaagcacaaacggaaacagttcctaactcctctgactctgaagaagtagaagtagaacaacagacaacaacaataaccacaccacccccatctgaaaatctgcacatgccaccacagcagcaccaagttcaatacaccccccatgtctctccaagggaagaagaatcatcatcactgatcacaattatggaccatgtgcttgagcaggatctgccatggagcttcatgtacactggcttgtctcagtttcaagatccaaacttggctttctgcaaaggtgatgatgacttggtgggcatgtttgatagtgcagggtttgaggaagacattgattttctgttcagcactcaacctggtgatgagactgagagtgatgtcaacaatatgagcgcagttttggatagtgttgagtgtggagacacaaatggggctggtggaagcatgatgcatgtggataacaagcagaagatagtatcatttgcttcttcaccatcatctacaactacagtttcttgtgactatgctctagatctatga

SEQ ID NO: 69 - protein, 412 aa, Glycine max
MKRSPASSCSSSTSSVGFEAPIEKRRPKHPRRNNLKSQKCKQNQTTTGGRRSSIYRGVTRHRWTGRFEAHLWDKSSWNNIQSKKGRQVYLGAYDTEESAARTYDLAALKYWGKDATLNFPIETYTKELEEMDKVSREEYLASLRRQSSGFSRGLSKYRGVARHHHNGRWEARIGRVCGNKYLYLGTYKTQEEAAVAYDMAAIEYRGVNAVTNFDISNYMDKIKKKNDQTQQQQTEAQTETVPNSSDSEEVEVEQQTTTITTPPPSENLHMPPQQHQVQYTPHVSPREEESSSLITIMDHVLEQDLPWSFMYTGLSQFQDPNLAFCKGDDDLVGMFDSAGFEEDIDFLFSTQPGDETESDVNNMSAVLDSVECGDTNGAGGSMMHVDNKQKIVSFASSPSSTTTVSCDYALDL

SEQ ID NO: 70 - DNA, 21 bp, artificial sequence
  Star sequence
ttactcaacccttttccctca

SEQ ID NO: 71 - DNA, 19 bp, artificial sequence
  star sequence
aagagagtacctatgtggt

SEQ ID NO: 72 - DNA, 958 bp, artificial sequence
  genomic miRNA precursor seq 159
ttctagctagctagggtttgggtagtgagtgtaataaagttgcaaagtttttggttaggttacgttttgaccttattattatagttcaaagggaaacattaattaaaggggattatgaagtggagctccttgaagtccaattgaggatcttactgggtgaattgagctgcttagctatggatcccacagttctacccatcaataagtgcttttgtggtagtcttgtggcttccatatctggggagcttcatttgcctttatagtattaaccttctttggattgaagggagctctacacccttctcttcttttctctcataataatttaaatttgttatagactctaaactttaaatgttttttttgaagtttttccgtttttctcttttgccatgatcccgttcttgctgtggagtaaccttgtccgaggtatgtgcatgattagatccatacttaatttgtgtgcatcacgaaggtgaggttgaaatgaactttgcttttttgaccttttaggaaagttcttttgttgcagtaatcaattttaattagttttaattgacactattacttttattgtcatctttgttagttttattgttgaattgagtgcatatttcctaggaaattctcttacctaacattttttatacagatctatgctcttggctcttgcccttactcttggccttgtgttggttatttgtctacatatttattgactggtcgatgagacatgtcacaattcttgggcttatttgttggtctaataaaaggagtgcttattgaaagatcaagacggagattcggttttatataaataaactaaagatgacatattagtgtgttgatgtctcttcaggataatttttgtttgaaataatatggtaatgtcttgtctaaatttgtgtacataattcttactgattttttggattgttggatttttataaacaaatct

SEQ ID NO: 73 - DNA, 574 bp, artificial sequence
  genomic miRNA precursor seq 396b
gcgagaaactttgtatgggcatggttatttctcacttctcaccctcctttactttcttatgctaaatcctccttcccctatatctccaccctcaacccctttttctcattataacttttggtgcctagatggtgtgtgtgtgtgcgcgcgagagatctgagctcaattttcctctctcaagtcctggtcatgcttttccacagctttcttgaacttcttatgcatcttatatctctccacctccaggattttaagccctagaagctcaagaaagctgtgggagaatatggcaattcaggcttttaattgctttcatttggtaccatcacttgcaagatttcagagtacaaggtgaacacacacatcttcctcttcatcaattctctagtttcatccttatcttttcattcacggtaactctcactaccctctttcatcttataagttataccgggggtgtgatgttgatgagtgtaaattaaatatatgtgatctctttctctggaaaaattttcagtgtgatatacataataatctcttaatctagagattttatggctttgttatatataag

SEQ ID NO: 74 - DNA, 1576 bp, artificial sequence
  AmiRNA precursor
ggccgcgcgagaaactttgtatgggcatggttatttctcacttctcaccctcctttactttcttatgctaaatcctccttcccctatatctccaccctcaacccctttttctcattataacttttggtgcctagatggtgtgtgtgtgtgcgcgcgagagatctgagctcagttttcctctctcaagtcctggtcatgctttgagggaaaagggttgaggaacttatgcatcttatatctctccacctccaggattttaagccctagttactcaacccttttccctcagaatatggcaattcaggcttttaattgctttcatttggtaccatcacttgcaagatttcagagtacaaggtgaacacacacatcttcctcttcatcaattctctagtttcatccttatcttttcattcacggtaactctcactaccctctttcatcttataagttataccgggggtgtgatgttgatgagtgtaaattaaatatatgtgatctctttctctggaaaaattttcagtgtgatatacataataatctcttaatctagagattttatggctttgttatatataagcggccaattctgcagatatccatcacactgaagcttttctagctagctagggtttgggtagtgagtgtaataaagttgcaaagtttttggttaggttacgttttgaccttattattatagttcaaagggaaacattaattaaaggggattatgaagaagagagtgtacctatgtggttgaggatcttactgggtgaattgagctgcttagctatggatcccacagttctacccatcaataagtgcttttgtggtagtcttgtggcttccatatctggggagcttcatttgcctttatagtattaaccttctccacataaatacactctcttcacccttctcttcttttctctcataataatttaaatttgttatagactctaaactttaaatgttttttttgaagtttttccgtttttctcttttgccatgatcccgttcttgctgtggagtaaccttgtccgaggtatgtgcatgattagatccatacttaatttgtgtgcatcacgaaggtgaggttgaaatgaactttgcttttttgaccttttaggaaagttcttttgttgcagtaatcaattttaattagttttaattgacactattacttttattgtcatctttgttagttttattgttgaattgagtgcatatttcctaggaaattctcttacctaacattttttatacagatctatgctcttggctcttgcccttactcttggccttgtgttggttatttgtctacatatttattgactggtcgatgagacatgtcacaattcttgggcttatttgttggtctaataaaaggagtgcttattgaaagatcaagacggagattcggttttatataaataaactaaagatgacatattagtgtgttgatgtctcttcaggataatttttgtttgaaataatatggtaatgtcttgtctaaatttgtgtacataattcttactgattttttggattgttggatttttataaacaaatctgc

SEQ ID NO: 75 - DNA, 8095 bp, artificial sequence
  plasmid pKR2109
gtacgaacggccgcgcatgctgacttaatcagctaacgccactcgagggggggcccggtaccggcgcgccgttctatagtgtcacctaaatcgtatgtgtatgatacataaggttatgtattaattgtagccgcgttctaacgacaatatgtccatatggtgcactctcagtacaatctgctctgatgccgcatagttaagccagccccgacacccgccaacacccgctgacgcgccctgacgggcttgtctgctcccggcatccgcttacagacaagctgtgaccgtctccgggagctgcatgtgtcagaggttttcaccgtcatcaccgaaacgcgcgagacgaaagggcctcgtgatacgcctatttttataggttaatgtcatgaccaaaatcccttaacgtgagttttcgttccactgagcgtcagaccccgtagaaaagatcaaaggatcttcttgagatcctttttttctgcgcgtaatctgctgcttgcaaacaaaaaaaccaccgctaccagcggtggtttgtttgccggatcaagagctaccaactctttttccgaaggtaactggcttcagcagagcgcagataccaaatactgtccttctagtgtagccgtagttaggccaccacttcaagaactctgtagcaccgcctacatacctcgctctgctaatcctgttaccagtggctgctgccagtggcgataagtcgtgtcttaccgggttggactcaagacgatagttaccggataaggcgcagcggtcgggctgaacggggggttcgtgcacacagcccagcttggagcgaacgacctacaccgaactgagatacctacagcgtgagcattgagaaagcgccacgcttcccgaagggagaaaggcggacaggtatccggtaagcggcagggtcggaacaggagagcgcacgagggagcttccagggggaaacgcctggtatctttatagtcctgtcgggtttcgccacctctgacttgagcgtcgatttttgtgatgctcgtcaggggggcggagcctatggaaaaacgccagcaacgcggcctttttacggttcctggccttttgctggccttttgctcacatgttctttcctgcgttatcccctgattctgtggataaccgtattaccgcctttgagtgagctgataccgctcgccgcagccgaacgaccgagcgcagcgagtcagtgagcgaggaagcggaagagcgcccaatacgcaaaccgcctctccccgcgcgttggccgattcattaatgcaggttgatcagatctcgatcccgcgaaattaatacgactcactatagggagaccacaacggtttccctctagaaataattttgtttaactttaagaaggagatatacccatggaaaagcctgaactcaccgcgacgtctgtcgagaagtttctgatcgaaaagttcgacagcgtctccgacctgatgcagctctcggagggcgaagaatctcgtgctttcagcttcgatgtaggagggcgtggatatgtcctgcgggtaaatagctgcgccgatggtttctacaaagatcgttatgtttatcggcactttgcatcggccgcgctcccgattccggaagtgcttgacattggggaattcagcgagagcctgacctattgcatctcccgccgtgcacagggtgtcacgttgcaagacctgcctgaaaccgaactgcccgctgttctgcagccggtcgcggaggctatggatgcgatcgctgcggccgatcttagccagacgagcgggttcggcccattcggaccgcaaggaatcggtcaatacactacatggcgtgatttcatatgcgcgattgctgatccccatgtgtatcactggcaaactgtgatggacgacaccgtcagtgcgtccgtcgcgcaggctctcgatgagctgatgctttgggccgaggactgccccgaagtccggcacctcgtgcacgcggatttcggctccaacaatgtcctgacggacaatggccgcataacagcggtcattgactggagcgaggcgatgttcggggattcccaatacgaggtcgccaacatcttcttctggaggccgtggttggcttgtatggagcagcagacgcgctacttcgagcggaggcatccggagcttgcaggatcgccgcggctccgggcgtatatgctccgcattggtcttgaccaactctatcagagcttggttgacggcaatttcgatgatgcagcttgggcgcagggtcgatgcgacgcaatcgtccgatccggagccgggactgtcgggcgtacacaaatcgcccgcagaagcgcggccgtctggaccgatggctgtgtagaagtactcgccgatagtggaaaccgacgccccagcactcgtccgagggcaaaggaatagtgaggtacagcttggatcgatccggctgctaacaaagcccgaaaggaagctgagttggctgctgccaccgctgagcaataactagcataaccccttggggcctctaaacgggtcttgaggggttttttgctgaaaggaggaactatatccggatgctcgggcgcgccggtacccgggtaccgagctcactagacgcggtgaaattacctaattaacaccggtgtttaaacactagtaacggccgccagtgtgctggaattcgcccttcccaagctttgctctagatcaaactcacatccaaacataacatggatatcttccttaccaatcatactaattattttgggttaaatattaatcattatttttaagatattaattaagaaattaaaagattttttaaaaaaatgtataaaattatattattcatgatttttcatacatttgattttgataataaatatattttttttaatttcttaaaaaatgttgcaagacacttattagacatagtcttgttctgtttacaaaagcattcatcatttaatacattaaaaaatatttaatactaacagtagaatcttcttgtgagtggtgtgggagtaggcaacctggcattgaaacgagagaaagagagtcagaaccagaagacaaataaaaagtatgcaacaaacaaatcaaaatcaaagggcaaaggctggggttggctcaattggttgctacattcaattttcaactcagtcaacggttgagattcactctgacttccccaatctaagccgcggatgcaaacggttgaatctaacccacaatccaatctcgttacttaggggcttttccgtcattaactcacccctgccacccggtttccctataaattggaactcaatgctcccctctaaactcgtatcgcttcagagttgagaccaagacacactcgttcatatatctctctgctcttctcttctcttctacctctcaaggtacttttcttctccctctaccaaatcctagattccgtggttcaatttcggatcttgcacttctggtttgctttgccttgctttttcctcaactgggtccatctaggatccatgtgaaactctactctttctttaatatctgcggaatacgcgtttgactttcagatctagtcgaaatcatttcataattgcctttctttcttttagcttatgagaaataaaatcactttttttttatttcaaaataaaccttgggccttgtgctgactgagatggggtttggtgattacagaattttagcgaattttgtaattgtacttgtttgtctgtagttttgttttgttttcttgtttctcatacattccttaggcttcaattttattcgagtataggtcacaataggaattcaaactttgagcaggggaattaatcccttccttcaaatccagtttgtttgtatatatgtttaaaaaatgaaacttttgctttaaattctattataactttttttatggctgaaatttttgcatgtgtctttgctctctgttgtaaatttactgtttaggtactaactctaggcttgttgtgcagtttttgaagtataacaacagaagttcctattccgaagttcctattctctagaaagtataggaacttccactagtccatgaaaaagcctgaactcaccgcgacgtctgtcgagaagtttctgatcgaaaagttcgacagcgtctccgacctgatgcagctctcggagggcgaagaatctcgtgctttcagcttcgatgtaggagggcgtggatatgtcctgcgggtaaatagctgcgccgatggtttctacaaagatcgttatgtttatcggcactttgcatcggccgcgctcccgattccggaagtgcttgacattggggaattcagcgagagcctgacctattgcatctcccgccgtgcacagggtgtcacgttgcaagacctgcctgaaaccgaactgcccgctgttctgcagccggtcgcggaggccatggatgcgatcgctgcggccgatcttagccagacgagcgggttcggcccattcggaccgcaaggaatcggtcaatacactacatggcgtgatttcatatgcgcgattgctgatccccatgtgtatcactggcaaactgtgatggacgacaccgtcagtgcgtccgtcgcgcaggctctcgatgagctgatgctttgggccgaggactgccccgaagtccggcacctcgtgcacgcggatttcggctccaacaatgtcctgacggacaatggccgcataacagcggtcattgactggagcgaggcgatgttcggggattcccaatacgaggtcgccaacatcttcttctggaggccgtggttggcttgtatggagcagcagacgcgctacttcgagcggaggcatccggagcttgcaggatcgccgcggctccgggcgtatatgctccgcattggtcttgaccaactctatcagagcttggttgacggcaatttcgatgatgcagcttgggcgcagggtcgatgcgacgcaatcgtccgatccggagccgggactgtcgggcgtacacaaatcgcccgcagaagcgcggccgtctggaccgatggctgtgtagaagtactcgccgatagtggaaaccgacgccccagcactcgtccgagggcaaaggaatagtgaggtacctaaagaaggagtgcgtcgaagcagatcgttcaaacatttggcaataaagtttcttaagattgaatcctgttgccggtcttgcgatgattatcatataatttctgttgaattacgttaagcatgtaataattaacatgtaatgcatgacgttatttatgagatgggtttttatgattagagtcccgcaattatacatttaatacgcgatagaaaacaaaatatagcgcgcaaactaggataaattatcgcgcgcggtgtcatctatgttactagatcgatgtcgacccgggccctaggcgtctttccacaatacataactattaattaatcttaaataaataaaggataaaatatttttttttcttcataaagttaaaatatgttattttttgtttagatgtatattcgaataaatctaaatatatgataatgattttttatattgattaaacatataatcaatattaaatatgatatttttttatataggttgtacacataattttataaggataaaaaatatgataaaaataaattttaaatatttttatatttacgagaaaaaaaaatattttagccataaataaatgaccagcatattttacaaccttagtaattcataaattcctatatgtatatttgaaattaaaaacagataatcgttaagggaaggaatcctacgtcatctcttgccatttgtttttcatgcaaacagaaagggacgaaaaaccacctcaccatgaatcactcttcacaccatttttactagcaaacaagtctcaacaactgaagccagctctctttccgtttctttttacaacactttctttgaaatagtagtattttttttcacatgatttattaacgtgccaaaagatgcttattgaatagagtgcacatttgtaatgtactactaattagaacatgaaaaagcattgttctaacacgataatcctgtgaaggcgttaactccaaagatccaatttcactatataaattgtgacgaaagcaaaatgaattcacatagctgagagagaaaggaaaggttaactaagaagcaatacttcagcggccgcgcgagaaactttgtatgggcatggttatttctcacttctcaccctcctttactttcttatgctaaatcctccttcccctatatctccaccctcaacccctttttctcattataacttttggtgcctagatggtgtgtgtgtgtgcgcgcgagagatctgagctcaattttcctctctcaagtcctggtcatgctttgagggaaaagggttgaggaacttatgcatcttatatctctccacctccaggattttaagccctagttactcaacccttttccctcagaatatggcaattcaggcttttaattgctttcatttggtaccatcacttgcaagatttcagagtacaaggtgaacacacacatcttcctcttcatcaattctctagtttcatccttatcttttcattcacggtaactctcactaccctctttcatcttataagttataccgggggtgtgatgttgatgagtgtaaattaaatatatgtgatctctttctctggaaaaattttcagtgtgatatacataataatctcttaatctagagattttatggctttgttatatataagcggcgcaagggcgaattctgcagatatccatcacacttgggccgcttctagctagctagggtttgggtagtgagtgtaataaagttgcaaagtttttggttaggttacgttttgaccttattattatagttcaaagggaaacattaattaaaggggattatgaagaagagagtgtacctatgtggttgaggatcttactgggtgaattgagctgcttagctatggatcccacagttctacccatcaataagtgcttttgtggtagtcttgtggcttccatatctggggagcttcatttgcctttatagtattaaccttctccacataaatacactctcttcacccttctcttcttttctctcataataatttaaatttgttatagactctaaactttaaatgttttttttgaagtttttccgtttttctcttttgccatgatcccgttcttgctgtggagtaaccttgtccgaggtatgtgcatgattagatccatacttaatttgtgtgcatcacgaaggtgaggttgaaatgaactttgcttttttgaccttttaggaaagttcttttgttgcagtaatcaattttaattagttttaattgacactattacttttattgtcatctttgttagttttattgttgaattgagtgcatatttcctaggaaattctcttacctaacattttttatacagatctatgctcttggctcttgcccttactcttggccttgtgttggttatttgtctacatatttattgactggtcgatgagacatgtcacaattcttgggcttatttgttggtctaataaaaggagtgcttattgaaagatcaagacggagattcggttttatataaataaactaaagatgacatattagtgtgttgatgtctcttcaggataatttttgtttgaaataatatggtaatgtcttgtctaaatttgtgtacataattcttactgattttttggattgttggatttttataaacaaatctggggcccaagcggccgcatgagccgtaaaggttcaatacaacgagtgcttgttttcttagggacaagcattgtacttatgtatgattctgtgtaaccatgagtcttccacgttgtactaatgtgaagggcaaaaataaaacacagaacaagttcgtttttctcaaataatgtgaaggtagaaaatggaaccatgcctcctctcttgcatgtgatttaaaatattagcagatgacctaggaggccggcccagctgatgatcccggtgaagttcctattccgaagttcctattctccagaaagtataggaacttcactagagcttgcggccgacctgcaggc

SEQ ID NO: 76 - DNA, 9979 bp, artificial sequence
  plasmid pKR1968
ggccgcatttcgcaccaaatcaatgaaagtaataatgaaaagtctgaataagaatacttaggcttagatgcctttgttacttgtgtaaaataacttgagtcatgtacctttggcggaaacagaataaataaaaggtgaaattccaatgctctatgtataagttagtaatacttaatgtgttctacggttgtttcaatatcatcaaactctaattgaaactttagaaccacaaatctcaatcttttcttaatgaaatgaaaaatcttaattgtaccatgtttatgttaaacaccttacaattaattggttggagaggaggaccaaccgatgggacaacattgggagaaagagattcaatggagatttggataggagaacaacattctttttcacttcaatacaagatgagtgcaacactaaggatatgtatgagactttcagaagctacgacaacatagatgagtgaggtggtgattcctagcaagaaagacattagaggaagccaaaatcgaacaaggaagacatcaagggcaagagacaggaccatccatctcaggaaaaggagctttgggatagtccgagaagttgtacaagaaattttttggagggtgagtgatgcattgctggtgactttaactcaatcaaaattgagaaagaaagaaaagggagggggctcacatgtgaatagaagggaaacgggagaattttacagttttgatctaatgggcatcccagctagtggtaacatattcaccatgtttaaccttcacgtacgagatccggccggccagatcctgcaggagatccaagcttggcgcgccgttctatagtgtcacctaaatcgtatgtgtatgatacataaggttatgtattaattgtagccgcgttctaacgacaatatgtccatatggtgcactctcagtacaatctgctctgatgccgcatagttaagccagccccgacacccgccaacacccgctgacgcgccctgacgggcttgtctgctcccggcatccgcttacagacaagctgtgaccgtctccgggagctgcatgtgtcagaggttttcaccgtcatcaccgaaacgcgcgagacgaaagggcctcgtgatacgcctatttttataggttaatgtcatgaccaaaatcccttaacgtgagttttcgttccactgagcgtcagaccccgtagaaaagatcaaaggatcttcttgagatcctttttttctgcgcgtaatctgctgcttgcaaacaaaaaaaccaccgctaccagcggtggtttgtttgccggatcaagagctaccaactctttttccgaaggtaactggcttcagcagagcgcagataccaaatactgtccttctagtgtagccgtagttaggccaccacttcaagaactctgtagcaccgcctacatacctcgctctgctaatcctgttaccagtggctgctgccagtggcgataagtcgtgtcttaccgggttggactcaagacgatagttaccggataaggcgcagcggtcgggctgaacggggggttcgtgcacacagcccagcttggagcgaacgacctacaccgaactgagatacctacagcgtgagcattgagaaagcgccacgcttcccgaagggagaaaggcggacaggtatccggtaagcggcagggtcggaacaggagagcgcacgagggagcttccagggggaaacgcctggtatctttatagtcctgtcgggtttcgccacctctgacttgagcgtcgatttttgtgatgctcgtcaggggggcggagcctatggaaaaacgccagcaacgcggcctttttacggttcctggccttttgctggccttttgctcacatgttctttcctgcgttatcccctgattctgtggataaccgtattaccgcctttgagtgagctgataccgctcgccgcagccgaacgaccgagcgcagcgagtcagtgagcgaggaagcggaagagcgcccaatacgcaaaccgcctctccccgcgcgttggccgattcattaatgcaggttgatcgattcgacatcgatctagtaacatagatgacaccgcgcgcgataatttatcctagtttgcgcgctatattttgttttctatcgcgtattaaatgtataattgcgggactctaatcataaaaacccatctcataaataacgtcatgcattacatgttaattattacatgcttaacgtaattcaacagaaattatatgataatcatcgcaagaccggcaacaggattcaatcttaagaaactttattgccaaatgtttgaacgatctgcttcgacgcactccttctttaggtacctcactattcctttgccctcggacgagtgctggggcgtcggtttccactatcggcgagtacttctacacagccatcggtccagacggccgcgcttctgcgggcgatttgtgtacgcccgacagtcccggctccggatcggacgattgcgtcgcatcgaccctgcgcccaagctgcatcatcgaaattgccgtcaaccaagctctgatagagttggtcaagaccaatgcggagcatatacgcccggagccgcggcgatcctgcaagctccggatgcctccgctcgaagtagcgcgtctgctgctccatacaagccaaccacggcctccagaagaagatgttggcgacctcgtattgggaatccccgaacatcgcctcgctccagtcaatgaccgctgttatgcggccattgtccgtcaggacattgttggagccgaaatccgcgtgcacgaggtgccggacttcggggcagtcctcggcccaaagcatcagctcatcgagagcctgcgcgacggacgcactgacggtgtcgtccatcacagtttgccagtgatacacatggggatcagcaatcgcgcatatgaaatcacgccatgtagtgtattgaccgattccttgcggtccgaatgggccgaacccgctcgtctggctaagatcggccgcagcgatcgcatccatggcctccgcgaccggctgcagaacagcgggcagttcggtttcaggcaggtcttgcaacgtgacaccctgtgcacggcgggagatgcaataggtcaggctctcgctgaattccccaatgtcaagcacttccggaatcgggagcgcggccgatgcaaagtgccgataaacataacgatctttgtagaaaccatcggcgcagctatttacccgcaggacatatccacgccctcctacatcgaagctgaaagcacgagattcttcgccctccgagagctgcatcaggtcggagacgctgtcgaacttttcgatcagaaacttctcgacagacgtcgcggtgagttcaggctttttcatggtttaataagaagagaaaagagttcttttgttatggctgaagtaatagagaaatgagctcgagcgtgtcctctccaaatgaaatgaacttccttatatagaggaagggtcttgcgaaggatagtgggattgtgcgtcatcccttacgtcagtggagatgtcacatcaatccacttgctttgaagacgtggttggaacgtcttctttttccacgatgctcctcgtgggtgggggtccatctttgggaccactgtcggcagaggcatcttgaatgatagcctttcctttatcgcaatgatggcatttgtaggagccaccttccttttctactgtcctttcgatgaagtgacagatagctgggcaatggaatccgaggaggtttcccgaaattatcctttgttgaaaagtctcaatagccctttggtcttctgagactgtatctttgacatttttggagtagaccagagtgtcgtgctccaccatgttgacgaagattttcttcttgtcattgagtcgtaaaagactctgtatgaactgttcgccagtcttcacggcgagttctgttagatcctcgatttgaatcttagactccatgcatggccttagattcagtaggaactacctttttagagactccaatctctattacttgccttggtttatgaagcaagccttgaatcgtccatactggaatagtacttctgatcttgagaaatatgtctttctctgtgttcttgatgcaattagtcctgaatcttttgactgcatctttaaccttcttgggaaggtatttgatctcctggagattgttactcgggtagatcgtcttgatgagacctgctgcgtaggcctctctaaccatctgtgggtcagcattctttctgaaattgaagaggctaaccttctcattatcagtggtgaacatagtgtcgtcaccttcaccttcgaacttccttcctagatcgtaaagatagaggaaatcgtccattgtaatctccggggcaaaggagatctcttttggggctggatcactgctgggccttttggttcctagcgtgagccagtgggctttttgctttggtgggcttgttagggccttagcaaagctcttgggcttgagttgagcttctcctttggggatgaagttcaacctgtctgtttgctgacttgttgtgtacgcgtcagctgctgctcttgcctctgtaatagtggcaaatttcttgtgtgcaactccgggaacgccgtttgttgccgcctttgtacaaccccagtcatcgtatataccggcatgtggaccgttatacacaacgtagtagttgatatgagggtgttgaatacccgattctgctctgagaggagcaactgtgctgttaagctcagatttttgtgggattggaattggatcgatctcgatcccgcgaaattaatacgactcactatagggagaccacaacggtttccctctagaaataattttgtttaactttaagaaggagatatacccatggaaaagcctgaactcaccgcgacgtctgtcgagaagtttctgatcgaaaagttcgacagcgtctccgacctgatgcagctctcggagggcgaagaatctcgtgctttcagcttcgatgtaggagggcgtggatatgtcctgcgggtaaatagctgcgccgatggtttctacaaagatcgttatgtttatcggcactttgcatcggccgcgctcccgattccggaagtgcttgacattggggaattcagcgagagcctgacctattgcatctcccgccgtgcacagggtgtcacgttgcaagacctgcctgaaaccgaactgcccgctgttctgcagccggtcgcggaggctatggatgcgatcgctgcggccgatcttagccagacgagcgggttcggcccattcggaccgcaaggaatcggtcaatacactacatggcgtgatttcatatgcgcgattgctgatccccatgtgtatcactggcaaactgtgatggacgacaccgtcagtgcgtccgtcgcgcaggctctcgatgagctgatgctttgggccgaggactgccccgaagtccggcacctcgtgcacgcggatttcggctccaacaatgtcctgacggacaatggccgcataacagcggtcattgactggagcgaggcgatgttcggggattcccaatacgaggtcgccaacatcttcttctggaggccgtggttggcttgtatggagcagcagacgcgctacttcgagcggaggcatccggagcttgcaggatcgccgcggctccgggcgtatatgctccgcattggtcttgaccaactctatcagagcttggttgacggcaatttcgatgatgcagcttgggcgcagggtcgatgcgacgcaatcgtccgatccggagccgggactgtcgggcgtacacaaatcgcccgcagaagcgcggccgtctggaccgatggctgtgtagaagtactcgccgatagtggaaaccgacgccccagcactcgtccgagggcaaaggaatagtgaggtacagcttggatcgatccggctgctaacaaagcccgaaaggaagctgagttggctgctgccaccgctgagcaataactagcataaccccttggggcctctaaacgggtcttgaggggttttttgctgaaaggaggaactatatccggatgatcgggcgcgccgtcgacggatccgtacgtcctgcaggtaaattgcagctgaaggacagtgaagggtgaatttatccatttaaaccattttctttttaacacatttcttatggtaatctcttctcactacactataaaaatggcttctcaatcccattttctacatcatcccattctattgagttttgtttatttgctttcacttttttttttatctgcctcttcccttaatttgcttgacttcttcttcacattttgctttgttttctcctccggcttccggtatttcaaattcaagatgagcaagttgaaatttataaatagaaatacagatattatttacaacgtcaaatctttggtattttcaatatttgaatggggtaaatttgtcatatagtcatcatcactgactacttatctaacctatttaatttggagcatattctttataaggtccctctcacggccaatgtctaattattgatatacagctcttgttttctagtgctgcttataatattatctacacatatatatggtactgcacactactactatatagtagtaagtaaactagcaacagccggggccaaactccaataactaggcattggggtttagttggtaatataaatataacatcaaaaagtctttgcttgtgacgaacatcacaatgcacccaccattgatgccacgacagacattgttaattttttttttaatttttaaaaaagaagcaattccaatagttctatattacaatctcacgtgatccaagcacaacgtttcattttttgtacatgctcgatatataaataatatttcattttatagtaaaatataatgacattttcgaatataatttttgaaatttcattttccaaatgaaatactaatattaatattaatgagattaccacaaatcatgttatgaatgaaataaagagttttggcattctaactttctttgaatagaacaaaatgtatacaacactctccatatatacacgatttattcagggatcatatacattctctcatgattaacatagtctgctttcttcacgtctaagcagataatttttggtccacaagataaaattatcattagtcgttttaattaattccttgagcatcaagcactaaaataattaaacttctccattaccaaaaaaaaaagataggtgattcagtaacatgtagtactagtactactgattttttttttcttttgattttaatgaatggttcgtatcgagcatcgagaaatccatttattaggtgtgtaatgtaatagtagtatttccttgattttcagtaataagatggattcttacatttatatctgtttgacagaaaatgttgtcaatgcatttcttgggcacaaagttttttgaaacatgaattaattttttcaaaatatttatgacatcaaattgaccctaaaataagtgataaagctttaacgtggaatgacattaatttttccatgataaataaaacacttaaaacattttaatattaatattataatcagttacaactatgttcaattaatgcaataacttttaaataaatattaaaatattttttttctgttctccaataaagagatcttgttgcacggaaaaagtcacattcttatttagtaaaaaattataattattgtttgaaaaatatcattttcactgcagaaaatttgatccagctctacagatcatacttttattgtacaataatacaataaaaatattcatctgcaggaaatatcattttcattgtacaataatataaagataaatatataccagaaaagaaaaagaaactgatgtggcacaatgtattcactgaaagaatgcatattgtatttcacctttcaagcagcactaagaatatacttcttttattatacttgtgcatttactcaaccaccctcggtggagtaagaaagaagatagataaaagttttttttgacatttggtgaatctcttaattaaaaaaataaaataatccatttcctttatttaatttcttttttcccatctgtgaaattccaattctgcttcgcgctcctgtctataaattgacttagccaccacctcagtttccattcattcacttcttctctttataccccccctctcttttttgcgttcattctgttttcgtaagtactgttgtttttctcttctatttctttttttgtttgtgttgtttttttttcttccttatcgttgttctgcctctcctctgtttcggtgctctgttcaccacttccacgtgagaatgatcttccttctttgcatgttcattctctcgtgaccactggatcagactccatgttctgatccagggtctctctctaacgcctgtactttcatccatgaccaccttaaaaacaacatgggggtggtgctgttacactaactctgtttctggggtgctgtctttgttcaattttactcagaaaatatcttttcttggattctattcggtgtgtgggaacatgatcctgtcggtcggttgtttttaggttaatccttaactggttacaaggatctaacgcttgaatgcatgtcctgagttaaagaaacaaaagaagaacacacctagtacagcctggcctcgaaccaagaacttctttgttggtttctcattattactaaaataaaataaagtatacgttttcttttttctttgggatgaacggttcagacttatgagaagtttaagctaatcctgtagtggagtgttcaatttattttaaactttaaagcaatagctcaagcactaaacttctttttcaagttcaaccactttggtagcttgctaattgctgctattgttctaattaattaatgtaattattgtttaaaaaagaaaagttggtgacactggaataaaaaagtgtactatctggcaattattcttctgcagcaatgtttgaggttgaaatcttagtagaacaaagtagaagatctggtatttatattttttgtagacagatggtgggggtgggtggtaggccttgaaatccaatatagttttgtagaataattttattattttttttttttgctcacttgtttgtggtattgattttgtgatgactcaagattaatgatttaccttcatttttttcatggtgacatattatgtatattcttgatctgtttcttacacttctttttcgttgttgtagctgttgaagtctgcggccgcaccatggaaactggaggctttcacggctaccgcaagctccccaacaccaccgctgggttgaagctgtcagtgtcagacatgaacatgaacatgaggcagcagcaggtagcatcatcagatcagaactgcagcaaccacagtgcagcaggagaggagaacgaatgcacggtgagggagcaagacaggttcatgccaatcgctaacgtgatacggatcatgcgcaagattctccctccacacgcaaaaatctccgatgatgcaaaggagacaatccaagagtgcgtgtcggagtacatcagcttcatcaccggggaggcgaacgagcgttgccagagggagcaacggaagaccataaccgcagaggacgtgctttgggccatgagcaagcttggattcgacgactacatcgaaccgttgaccatgtaccttcaccgctaccgtgaacttgagggtgaccgcacctctatgaggggtgaaccactcgggaagaggactgtggaatacgccacgcttggtgttgctactgcttttgtccctccaccctatcatcaccacaatgggtactttggtgctgccatgcccatggggacttacgttagggaagcgccaccaaatacagcctcctcccatcaccaccaccaccaccaccaccaccatgctcgtggaatctccaatgctcatgaaccaaatgctcgctccatataagc

SEQ ID NO: 77 - DNA, 10513 bp, artificial sequence
  plasmid pKR1971
ggccgcatttcgcaccaaatcaatgaaagtaataatgaaaagtctgaataagaatacttaggcttagatgcctttgttacttgtgtaaaataacttgagtcatgtacctttggcggaaacagaataaataaaaggtgaaattccaatgctctatgtataagttagtaatacttaatgtgttctacggttgtttcaatatcatcaaactctaattgaaactttagaaccacaaatctcaatcttttcttaatgaaatgaaaaatcttaattgtaccatgtttatgttaaacaccttacaattaattggttggagaggaggaccaaccgatgggacaacattgggagaaagagattcaatggagatttggataggagaacaacattctttttcacttcaatacaagatgagtgcaacactaaggatatgtatgagactttcagaagctacgacaacatagatgagtgaggtggtgattcctagcaagaaagacattagaggaagccaaaatcgaacaaggaagacatcaagggcaagagacaggaccatccatctcaggaaaaggagctttgggatagtccgagaagttgtacaagaaattttttggagggtgagtgatgcattgctggtgactttaactcaatcaaaattgagaaagaaagaaaagggagggggctcacatgtgaatagaagggaaacgggagaattttacagttttgatctaatgggcatcccagctagtggtaacatattcaccatgtttaaccttcacgtacgagatccggccggccagatcctgcaggagatccaagcttggcgcgccgttctatagtgtcacctaaatcgtatgtgtatgatacataaggttatgtattaattgtagccgcgttctaacgacaatatgtccatatggtgcactctcagtacaatctgctctgatgccgcatagttaagccagccccgacacccgccaacacccgctgacgcgccctgacgggcttgtctgctcccggcatccgcttacagacaagctgtgaccgtctccgggagctgcatgtgtcagaggttttcaccgtcatcaccgaaacgcgcgagacgaaagggcctcgtgatacgcctatttttataggttaatgtcatgaccaaaatcccttaacgtgagttttcgttccactgagcgtcagaccccgtagaaaagatcaaaggatcttcttgagatcctttttttctgcgcgtaatctgctgcttgcaaacaaaaaaaccaccgctaccagcggtggtttgtttgccggatcaagagctaccaactctttttccgaaggtaactggcttcagcagagcgcagataccaaatactgtccttctagtgtagccgtagttaggccaccacttcaagaactctgtagcaccgcctacatacctcgctctgctaatcctgttaccagtggctgctgccagtggcgataagtcgtgtcttaccgggttggactcaagacgatagttaccggataaggcgcagcggtcgggctgaacggggggttcgtgcacacagcccagcttggagcgaacgacctacaccgaactgagatacctacagcgtgagcattgagaaagcgccacgcttcccgaagggagaaaggcggacaggtatccggtaagcggcagggtcggaacaggagagcgcacgagggagcttccagggggaaacgcctggtatctttatagtcctgtcgggtttcgccacctctgacttgagcgtcgatttttgtgatgctcgtcaggggggcggagcctatggaaaaacgccagcaacgcggcctttttacggttcctggccttttgctggccttttgctcacatgttctttcctgcgttatcccctgattctgtggataaccgtattaccgcctttgagtgagctgataccgctcgccgcagccgaacgaccgagcgcagcgagtcagtgagcgaggaagcggaagagcgcccaatacgcaaaccgcctctccccgcgcgttggccgattcattaatgcaggttgatcgattcgacatcgatctagtaacatagatgacaccgcgcgcgataatttatcctagtttgcgcgctatattttgttttctatcgcgtattaaatgtataattgcgggactctaatcataaaaacccatctcataaataacgtcatgcattacatgttaattattacatgcttaacgtaattcaacagaaattatatgataatcatcgcaagaccggcaacaggattcaatcttaagaaactttattgccaaatgtttgaacgatctgcttcgacgcactccttctttaggtacctcactattcctttgccctcggacgagtgctggggcgtcggtttccactatcggcgagtacttctacacagccatcggtccagacggccgcgcttctgcgggcgatttgtgtacgcccgacagtcccggctccggatcggacgattgcgtcgcatcgaccctgcgcccaagctgcatcatcgaaattgccgtcaaccaagctctgatagagttggtcaagaccaatgcggagcatatacgcccggagccgcggcgatcctgcaagctccggatgcctccgctcgaagtagcgcgtctgctgctccatacaagccaaccacggcctccagaagaagatgttggcgacctcgtattgggaatccccgaacatcgcctcgctccagtcaatgaccgctgttatgcggccattgtccgtcaggacattgttggagccgaaatccgcgtgcacgaggtgccggacttcggggcagtcctcggcccaaagcatcagctcatcgagagcctgcgcgacggacgcactgacggtgtcgtccatcacagtttgccagtgatacacatggggatcagcaatcgcgcatatgaaatcacgccatgtagtgtattgaccgattccttgcggtccgaatgggccgaacccgctcgtctggctaagatcggccgcagcgatcgcatccatggcctccgcgaccggctgcagaacagcgggcagttcggtttcaggcaggtcttgcaacgtgacaccctgtgcacggcgggagatgcaataggtcaggctctcgctgaattccccaatgtcaagcacttccggaatcgggagcgcggccgatgcaaagtgccgataaacataacgatctttgtagaaaccatcggcgcagctatttacccgcaggacatatccacgccctcctacatcgaagctgaaagcacgagattcttcgccctccgagagctgcatcaggtcggagacgctgtcgaacttttcgatcagaaacttctcgacagacgtcgcggtgagttcaggctttttcatggtttaataagaagagaaaagagttcttttgttatggctgaagtaatagagaaatgagctcgagcgtgtcctctccaaatgaaatgaacttccttatatagaggaagggtcttgcgaaggatagtgggattgtgcgtcatcccttacgtcagtggagatgtcacatcaatccacttgctttgaagacgtggttggaacgtcttctttttccacgatgctcctcgtgggtgggggtccatctttgggaccactgtcggcagaggcatcttgaatgatagcctttcctttatcgcaatgatggcatttgtaggagccaccttccttttctactgtcctttcgatgaagtgacagatagctgggcaatggaatccgaggaggtttcccgaaattatcctttgttgaaaagtctcaatagccctttggtcttctgagactgtatctttgacatttttggagtagaccagagtgtcgtgctccaccatgttgacgaagattttcttcttgtcattgagtcgtaaaagactctgtatgaactgttcgccagtcttcacggcgagttctgttagatcctcgatttgaatcttagactccatgcatggccttagattcagtaggaactacctttttagagactccaatctctattacttgccttggtttatgaagcaagccttgaatcgtccatactggaatagtacttctgatcttgagaaatatgtctttctctgtgttcttgatgcaattagtcctgaatcttttgactgcatctttaaccttcttgggaaggtatttgatctcctggagattgttactcgggtagatcgtcttgatgagacctgctgcgtaggcctctctaaccatctgtgggtcagcattctttctgaaattgaagaggctaaccttctcattatcagtggtgaacatagtgtcgtcaccttcaccttcgaacttccttcctagatcgtaaagatagaggaaatcgtccattgtaatctccggggcaaaggagatctcttttggggctggatcactgctgggccttttggttcctagcgtgagccagtgggctttttgctttggtgggcttgttagggccttagcaaagctcttgggcttgagttgagcttctcctttggggatgaagttcaacctgtctgtttgctgacttgttgtgtacgcgtcagctgctgctcttgcctctgtaatagtggcaaatttcttgtgtgcaactccgggaacgccgtttgttgccgcctttgtacaaccccagtcatcgtatataccggcatgtggaccgttatacacaacgtagtagttgatatgagggtgttgaatacccgattctgctctgagaggagcaactgtgctgttaagctcagatttttgtgggattggaattggatcgatctcgatcccgcgaaattaatacgactcactatagggagaccacaacggtttccctctagaaataattttgtttaactttaagaaggagatatacccatggaaaagcctgaactcaccgcgacgtctgtcgagaagtttctgatcgaaaagttcgacagcgtctccgacctgatgcagctctcggagggcgaagaatctcgtgctttcagcttcgatgtaggagggcgtggatatgtcctgcgggtaaatagctgcgccgatggtttctacaaagatcgttatgtttatcggcactttgcatcggccgcgctcccgattccggaagtgcttgacattggggaattcagcgagagcctgacctattgcatctcccgccgtgcacagggtgtcacgttgcaagacctgcctgaaaccgaactgcccgctgttctgcagccggtcgcggaggctatggatgcgatcgctgcggccgatcttagccagacgagcgggttcggcccattcggaccgcaaggaatcggtcaatacactacatggcgtgatttcatatgcgcgattgctgatccccatgtgtatcactggcaaactgtgatggacgacaccgtcagtgcgtccgtcgcgcaggctctcgatgagctgatgctttgggccgaggactgccccgaagtccggcacctcgtgcacgcggatttcggctccaacaatgtcctgacggacaatggccgcataacagcggtcattgactggagcgaggcgatgttcggggattcccaatacgaggtcgccaacatcttcttctggaggccgtggttggcttgtatggagcagcagacgcgctacttcgagcggaggcatccggagcttgcaggatcgccgcggctccgggcgtatatgctccgcattggtcttgaccaactctatcagagcttggttgacggcaatttcgatgatgcagcttgggcgcagggtcgatgcgacgcaatcgtccgatccggagccgggactgtcgggcgtacacaaatcgcccgcagaagcgcggccgtctggaccgatggctgtgtagaagtactcgccgatagtggaaaccgacgccccagcactcgtccgagggcaaaggaatagtgaggtacagcttggatcgatccggctgctaacaaagcccgaaaggaagctgagttggctgctgccaccgctgagcaataactagcataaccccttggggcctctaaacgggtcttgaggggttttttgctgaaaggaggaactatatccggatgatcgggcgcgccgtcgacggatccgtacgtcctgcaggtaaattgcagctgaaggacagtgaagggtgaatttatccatttaaaccattttctttttaacacatttcttatggtaatctcttctcactacactataaaaatggcttctcaatcccattttctacatcatcccattctattgagttttgtttatttgctttcacttttttttttatctgcctcttcccttaatttgcttgacttcttcttcacattttgctttgttttctcctccggcttccggtatttcaaattcaagatgagcaagttgaaatttataaatagaaatacagatattatttacaacgtcaaatctttggtattttcaatatttgaatggggtaaatttgtcatatagtcatcatcactgactacttatctaacctatttaatttggagcatattctttataaggtccctctcacggccaatgtctaattattgatatacagctcttgttttctagtgctgcttataatattatctacacatatatatggtactgcacactactactatatagtagtaagtaaactagcaacagccggggccaaactccaataactaggcattggggtttagttggtaatataaatataacatcaaaaagtctttgcttgtgacgaacatcacaatgcacccaccattgatgccacgacagacattgttaattttttttttaatttttaaaaaagaagcaattccaatagttctatattacaatctcacgtgatccaagcacaacgtttcattttttgtacatgctcgatatataaataatatttcattttatagtaaaatataatgacattttcgaatataatttttgaaatttcattttccaaatgaaatactaatattaatattaatgagattaccacaaatcatgttatgaatgaaataaagagttttggcattctaactttctttgaatagaacaaaatgtatacaacactctccatatatacacgatttattcagggatcatatacattctctcatgattaacatagtctgctttcttcacgtctaagcagataatttttggtccacaagataaaattatcattagtcgttttaattaattccttgagcatcaagcactaaaataattaaacttctccattaccaaaaaaaaaagataggtgattcagtaacatgtagtactagtactactgattttttttttcttttgattttaatgaatggttcgtatcgagcatcgagaaatccatttattaggtgtgtaatgtaatagtagtatttccttgattttcagtaataagatggattcttacatttatatctgtttgacagaaaatgttgtcaatgcatttcttgggcacaaagttttttgaaacatgaattaattttttcaaaatatttatgacatcaaattgaccctaaaataagtgataaagctttaacgtggaatgacattaatttttccatgataaataaaacacttaaaacattttaatattaatattataatcagttacaactatgttcaattaatgcaataacttttaaataaatattaaaatattttttttctgttctccaataaagagatcttgttgcacggaaaaagtcacattcttatttagtaaaaaattataattattgtttgaaaaatatcattttcactgcagaaaatttgatccagctctacagatcatacttttattgtacaataatacaataaaaatattcatctgcaggaaatatcattttcattgtacaataatataaagataaatatataccagaaaagaaaaagaaactgatgtggcacaatgtattcactgaaagaatgcatattgtatttcacctttcaagcagcactaagaatatacttcttttattatacttgtgcatttactcaaccaccctcggtggagtaagaaagaagatagataaaagttttttttgacatttggtgaatctcttaattaaaaaaataaaataatccatttcctttatttaatttcttttttcccatctgtgaaattccaattctgcttcgcgctcctgtctataaattgacttagccaccacctcagtttccattcattcacttcttctctttataccccccctctcttttttgcgttcattctgttttcgtaagtactgttgtttttctcttctatttctttttttgtttgtgttgtttttttttcttccttatcgttgttctgcctctcctctgtttcggtgctctgttcaccacttccacgtgagaatgatcttccttctttgcatgttcattctctcgtgaccactggatcagactccatgttctgatccagggtctctctctaacgcctgtactttcatccatgaccaccttaaaaacaacatgggggtggtgctgttacactaactctgtttctggggtgctgtctttgttcaattttactcagaaaatatcttttcttggattctattcggtgtgtgggaacatgatcctgtcggtcggttgtttttaggttaatccttaactggttacaaggatctaacgcttgaatgcatgtcctgagttaaagaaacaaaagaagaacacacctagtacagcctggcctcgaaccaagaacttctttgttggtttctcattattactaaaataaaataaagtatacgttttcttttttctttgggatgaacggttcagacttatgagaagtttaagctaatcctgtagtggagtgttcaatttattttaaactttaaagcaatagctcaagcactaaacttctttttcaagttcaaccactttggtagcttgctaattgctgctattgttctaattaattaatgtaattattgtttaaaaaagaaaagttggtgacactggaataaaaaagtgtactatctggcaattattcttctgcagcaatgtttgaggttgaaatcttagtagaacaaagtagaagatctggtatttatattttttgtagacagatggtgggggtgggtggtaggccttgaaatccaatatagttttgtagaataattttattattttttttttttgctcacttgtttgtggtattgattttgtgatgactcaagattaatgatttaccttcatttttttcatggtgacatattatgtatattcttgatctgtttcttacacttctttttcgttgttgtagctgttgaagtctgcggccgcatgaagaggtctccagcatcttcttgttcatcatctacttcctctgttgggtttgaagctcccattgaaaaaagaaggcctaagcatccaaggaggaataatttgaagtcacaaaaatgcaagcagaaccaaaccaccactggtggcagaagaagctctatctatagaggagttacaaggcataggtggacagggaggtttgaagctcacctatgggataagagctcttggaacaacattcagagcaagaagggtcgacaagtttatttgggggcatatgatactgaagaatctgcagcccgtacctatgaccttgcagcccttaaatactggggaaaagatgcaaccctgaatttcccgatagaaacttataccaaggagctcgaggaaatggacaaggtttcaagagaagaatatttggcttctttgcggcgccaaagcagtggcttttctagaggcctgtctaagtaccgtggggttgctaggcatcatcataatggtcgctgggaagcacgaattggaagagtatgcggaaacaagtacctctacttggggacatataaaactcaagaggaggcagcagtggcatatgacatggcagcaatagagtaccgtggagtcaatgcagtgaccaattttgacataagcaactacatggacaaaataaagaagaaaaatgaccaaacccaacaacaacaaacagaagcacaaacggaaacagttcctaactcctctgactctgaagaagtagaagtagaacaacagacaacaacaataaccacaccacccccatctgaaaatctgcacatgccaccacagcagcaccaagttcaatacaccccccatgtctctccaagggaagaagaatcatcatcactgatcacaattatggaccatgtgcttgagcaggatctgccatggagcttcatgtacactggcttgtctcagtttcaagatccaaacttggctttctgcaaaggtgatgatgacttggtgggcatgtttgatagtgcagggtttgaggaagacattgattttctgttcagcactcaacctggtgatgagactgagagtgatgtcaacaatatgagcgcagttttggatagtgttgagtgtggagacacaaatggggctggtggaagcatgatgcatgtggataacaagcagaagatagtatcatttgcttcttcaccatcatctacaactacagtttcttgtgactatgctctagatctatgagc

SEQ ID NO: 78 - DNA, 12788 bp, artificial sequence
  plasmid pKR2118
ggcgtacgaacggccgcgcatgctgacttaatcagctaacgccactcgagggggggcccggtaccggcgcgccgttctatagtgtcacctaaatcgtatgtgtatgatacataaggttatgtattaattgtagccgcgttctaacgacaatatgtccatatggtgcactctcagtacaatctgctctgatgccgcatagttaagccagccccgacacccgccaacacccgctgacgcgccctgacgggcttgtctgctcccggcatccgcttacagacaagctgtgaccgtctccgggagctgcatgtgtcagaggttttcaccgtcatcaccgaaacgcgcgagacgaaagggcctcgtgatacgcctatttttataggttaatgtcatgaccaaaatcccttaacgtgagttttcgttccactgagcgtcagaccccgtagaaaagatcaaaggatcttcttgagatcctttttttctgcgcgtaatctgctgcttgcaaacaaaaaaaccaccgctaccagcggtggtttgtttgccggatcaagagctaccaactctttttccgaaggtaactggcttcagcagagcgcagataccaaatactgtccttctagtgtagccgtagttaggccaccacttcaagaactctgtagcaccgcctacatacctcgctctgctaatcctgttaccagtggctgctgccagtggcgataagtcgtgtcttaccgggttggactcaagacgatagttaccggataaggcgcagcggtcgggctgaacggggggttcgtgcacacagcccagcttggagcgaacgacctacaccgaactgagatacctacagcgtgagcattgagaaagcgccacgcttcccgaagggagaaaggcggacaggtatccggtaagcggcagggtcggaacaggagagcgcacgagggagcttccagggggaaacgcctggtatctttatagtcctgtcgggtttcgccacctctgacttgagcgtcgatttttgtgatgctcgtcaggggggcggagcctatggaaaaacgccagcaacgcggcctttttacggttcctggccttttgctggccttttgctcacatgttctttcctgcgttatcccctgattctgtggataaccgtattaccgcctttgagtgagctgataccgctcgccgcagccgaacgaccgagcgcagcgagtcagtgagcgaggaagcggaagagcgcccaatacgcaaaccgcctctccccgcgcgttggccgattcattaatgcaggttgatcagatctcgatcccgcgaaattaatacgactcactatagggagaccacaacggtttccctctagaaataattttgtttaactttaagaaggagatatacccatggaaaagcctgaactcaccgcgacgtctgtcgagaagtttctgatcgaaaagttcgacagcgtctccgacctgatgcagctctcggagggcgaagaatctcgtgctttcagcttcgatgtaggagggcgtggatatgtcctgcgggtaaatagctgcgccgatggtttctacaaagatcgttatgtttatcggcactttgcatcggccgcgctcccgattccggaagtgcttgacattggggaattcagcgagagcctgacctattgcatctcccgccgtgcacagggtgtcacgttgcaagacctgcctgaaaccgaactgcccgctgttctgcagccggtcgcggaggctatggatgcgatcgctgcggccgatcttagccagacgagcgggttcggcccattcggaccgcaaggaatcggtcaatacactacatggcgtgatttcatatgcgcgattgctgatccccatgtgtatcactggcaaactgtgatggacgacaccgtcagtgcgtccgtcgcgcaggctctcgatgagctgatgctttgggccgaggactgccccgaagtccggcacctcgtgcacgcggatttcggctccaacaatgtcctgacggacaatggccgcataacagcggtcattgactggagcgaggcgatgttcggggattcccaatacgaggtcgccaacatcttcttctggaggccgtggttggcttgtatggagcagcagacgcgctacttcgagcggaggcatccggagcttgcaggatcgccgcggctccgggcgtatatgctccgcattggtcttgaccaactctatcagagcttggttgacggcaatttcgatgatgcagcttgggcgcagggtcgatgcgacgcaatcgtccgatccggagccgggactgtcgggcgtacacaaatcgcccgcagaagcgcggccgtctggaccgatggctgtgtagaagtactcgccgatagtggaaaccgacgccccagcactcgtccgagggcaaaggaatagtgaggtacagcttggatcgatccggctgctaacaaagcccgaaaggaagctgagttggctgctgccaccgctgagcaataactagcataaccccttggggcctctaaacgggtcttgaggggttttttgctgaaaggaggaactatatccggatgctcgggcgcgccggtacccgggtaccgagctcactagacgcggtgaaattacctaattaacaccggtgtttaaacactagtaacggccgccagtgtgctggaattcgcccttcccaagctttgctctagatcaaactcacatccaaacataacatggatatcttccttaccaatcatactaattattttgggttaaatattaatcattatttttaagatattaattaagaaattaaaagattttttaaaaaaatgtataaaattatattattcatgatttttcatacatttgattttgataataaatatattttttttaatttcttaaaaaatgttgcaagacacttattagacatagtcttgttctgtttacaaaagcattcatcatttaatacattaaaaaatatttaatactaacagtagaatcttcttgtgagtggtgtgggagtaggcaacctggcattgaaacgagagaaagagagtcagaaccagaagacaaataaaaagtatgcaacaaacaaatcaaaatcaaagggcaaaggctggggttggctcaattggttgctacattcaattttcaactcagtcaacggttgagattcactctgacttccccaatctaagccgcggatgcaaacggttgaatctaacccacaatccaatctcgttacttaggggcttttccgtcattaactcacccctgccacccggtttccctataaattggaactcaatgctcccctctaaactcgtatcgcttcagagttgagaccaagacacactcgttcatatatctctctgctcttctcttctcttctacctctcaaggtacttttcttctccctctaccaaatcctagattccgtggttcaatttcggatcttgcacttctggtttgctttgccttgctttttcctcaactgggtccatctaggatccatgtgaaactctactctttctttaatatctgcggaatacgcgtttgactttcagatctagtcgaaatcatttcataattgcctttctttcttttagcttatgagaaataaaatcactttttttttatttcaaaataaaccttgggccttgtgctgactgagatggggtttggtgattacagaattttagcgaattttgtaattgtacttgtttgtctgtagttttgttttgttttcttgtttctcatacattccttaggcttcaattttattcgagtataggtcacaataggaattcaaactttgagcaggggaattaatcccttccttcaaatccagtttgtttgtatatatgtttaaaaaatgaaacttttgctttaaattctattataactttttttatggctgaaatttttgcatgtgtctttgctctctgttgtaaatttactgtttaggtactaactctaggcttgttgtgcagtttttgaagtataacaacagaagttcctattccgaagttcctattctctagaaagtataggaacttccactagtccatgaaaaagcctgaactcaccgcgacgtctgtcgagaagtttctgatcgaaaagttcgacagcgtctccgacctgatgcagctctcggagggcgaagaatctcgtgctttcagcttcgatgtaggagggcgtggatatgtcctgcgggtaaatagctgcgccgatggtttctacaaagatcgttatgtttatcggcactttgcatcggccgcgctcccgattccggaagtgcttgacattggggaattcagcgagagcctgacctattgcatctcccgccgtgcacagggtgtcacgttgcaagacctgcctgaaaccgaactgcccgctgttctgcagccggtcgcggaggccatggatgcgatcgctgcggccgatcttagccagacgagcgggttcggcccattcggaccgcaaggaatcggtcaatacactacatggcgtgatttcatatgcgcgattgctgatccccatgtgtatcactggcaaactgtgatggacgacaccgtcagtgcgtccgtcgcgcaggctctcgatgagctgatgctttgggccgaggactgccccgaagtccggcacctcgtgcacgcggatttcggctccaacaatgtcctgacggacaatggccgcataacagcggtcattgactggagcgaggcgatgttcggggattcccaatacgaggtcgccaacatcttcttctggaggccgtggttggcttgtatggagcagcagacgcgctacttcgagcggaggcatccggagcttgcaggatcgccgcggctccgggcgtatatgctccgcattggtcttgaccaactctatcagagcttggttgacggcaatttcgatgatgcagcttgggcgcagggtcgatgcgacgcaatcgtccgatccggagccgggactgtcgggcgtacacaaatcgcccgcagaagcgcggccgtctggaccgatggctgtgtagaagtactcgccgatagtggaaaccgacgccccagcactcgtccgagggcaaaggaatagtgaggtacctaaagaaggagtgcgtcgaagcagatcgttcaaacatttggcaataaagtttcttaagattgaatcctgttgccggtcttgcgatgattatcatataatttctgttgaattacgttaagcatgtaataattaacatgtaatgcatgacgttatttatgagatgggtttttatgattagagtcccgcaattatacatttaatacgcgatagaaaacaaaatatagcgcgcaaactaggataaattatcgcgcgcggtgtcatctatgttactagatcgatgtcgacccgggccctaggcgtctttccacaatacataactattaattaatcttaaataaataaaggataaaatatttttttttcttcataaagttaaaatatgttattttttgtttagatgtatattcgaataaatctaaatatatgataatgattttttatattgattaaacatataatcaatattaaatatgatatttttttatataggttgtacacataattttataaggataaaaaatatgataaaaataaattttaaatatttttatatttacgagaaaaaaaaatattttagccataaataaatgaccagcatattttacaaccttagtaattcataaattcctatatgtatatttgaaattaaaaacagataatcgttaagggaaggaatcctacgtcatctcttgccatttgtttttcatgcaaacagaaagggacgaaaaaccacctcaccatgaatcactcttcacaccatttttactagcaaacaagtctcaacaactgaagccagctctctttccgtttctttttacaacactttctttgaaatagtagtattttttttcacatgatttattaacgtgccaaaagatgcttattgaatagagtgcacatttgtaatgtactactaattagaacatgaaaaagcattgttctaacacgataatcctgtgaaggcgttaactccaaagatccaatttcactatataaattgtgacgaaagcaaaatgaattcacatagctgagagagaaaggaaaggttaactaagaagcaatacttcagcggccgcgcgagaaactttgtatgggcatggttatttctcacttctcaccctcctttactttcttatgctaaatcctccttcccctatatctccaccctcaacccctttttctcattataacttttggtgcctagatggtgtgtgtgtgtgcgcgcgagagatctgagctcaattttcctctctcaagtcctggtcatgctttgagggaaaagggttgaggaacttatgcatcttatatctctccacctccaggattttaagccctagttactcaacccttttccctcagaatatggcaattcaggcttttaattgctttcatttggtaccatcacttgcaagatttcagagtacaaggtgaacacacacatcttcctcttcatcaattctctagtttcatccttatcttttcattcacggtaactctcactaccctctttcatcttataagttataccgggggtgtgatgttgatgagtgtaaattaaatatatgtgatctctttctctggaaaaattttcagtgtgatatacataataatctcttaatctagagattttatggctttgttatatataagcggcgcaagggcgaattctgcagatatccatcacacttgggccgcttctagctagctagggtttgggtagtgagtgtaataaagttgcaaagtttttggttaggttacgttttgaccttattattatagttcaaagggaaacattaattaaaggggattatgaagaagagagtgtacctatgtggttgaggatcttactgggtgaattgagctgcttagctatggatcccacagttctacccatcaataagtgcttttgtggtagtcttgtggcttccatatctggggagcttcatttgcctttatagtattaaccttctccacataaatacactctcttcacccttctcttcttttctctcataataatttaaatttgttatagactctaaactttaaatgttttttttgaagtttttccgtttttctcttttgccatgatcccgttcttgctgtggagtaaccttgtccgaggtatgtgcatgattagatccatacttaatttgtgtgcatcacgaaggtgaggttgaaatgaactttgcttttttgaccttttaggaaagttcttttgttgcagtaatcaattttaattagttttaattgacactattacttttattgtcatctttgttagttttattgttgaattgagtgcatatttcctaggaaattctcttacctaacattttttatacagatctatgctcttggctcttgcccttactcttggccttgtgttggttatttgtctacatatttattgactggtcgatgagacatgtcacaattcttgggcttatttgttggtctaataaaaggagtgcttattgaaagatcaagacggagattcggttttatataaataaactaaagatgacatattagtgtgttgatgtctcttcaggataatttttgtttgaaataatatggtaatgtcttgtctaaatttgtgtacataattcttactgattttttggattgttggatttttataaacaaatctggggcccaagcggccgcatgagccgtaaaggttcaatacaacgagtgcttgttttcttagggacaagcattgtacttatgtatgattctgtgtaaccatgagtcttccacgttgtactaatgtgaagggcaaaaataaaacacagaacaagttcgtttttctcaaataatgtgaaggtagaaaatggaaccatgcctcctctcttgcatgtgatttaaaatattagcagatgacctaggaggccggcccagctgatgatcccggtgaagttcctattccgaagttcctattctccagaaagtataggaacttcactagagcttgcggccgacctgcaggtaaattgcagctgaaggacagtgaagggtgaatttatccatttaaaccattttctttttaacacatttcttatggtaatctcttctcactacactataaaaatggcttctcaatcccattttctacatcatcccattctattgagttttgtttatttgctttcacttttttttttatctgcctcttcccttaatttgcttgacttcttcttcacattttgctttgttttctcctccggcttccggtatttcaaattcaagatgagcaagttgaaatttataaatagaaatacagatattatttacaacgtcaaatctttggtattttcaatatttgaatggggtaaatttgtcatatagtcatcatcactgactacttatctaacctatttaatttggagcatattctttataaggtccctctcacggccaatgtctaattattgatatacagctcttgttttctagtgctgcttataatattatctacacatatatatggtactgcacactactactatatagtagtaagtaaactagcaacagccggggccaaactccaataactaggcattggggtttagttggtaatataaatataacatcaaaaagtctttgcttgtgacgaacatcacaatgcacccaccattgatgccacgacagacattgttaattttttttttaatttttaaaaaagaagcaattccaatagttctatattacaatctcacgtgatccaagcacaacgtttcattttttgtacatgctcgatatataaataatatttcattttatagtaaaatataatgacattttcgaatataatttttgaaatttcattttccaaatgaaatactaatattaatattaatgagattaccacaaatcatgttatgaatgaaataaagagttttggcattctaactttctttgaatagaacaaaatgtatacaacactctccatatatacacgatttattcagggatcatatacattctctcatgattaacatagtctgctttcttcacgtctaagcagataatttttggtccacaagataaaattatcattagtcgttttaattaattccttgagcatcaagcactaaaataattaaacttctccattaccaaaaaaaaaagataggtgattcagtaacatgtagtactagtactactgattttttttttcttttgattttaatgaatggttcgtatcgagcatcgagaaatccatttattaggtgtgtaatgtaatagtagtatttccttgattttcagtaataagatggattcttacatttatatctgtttgacagaaaatgttgtcaatgcatttcttgggcacaaagttttttgaaacatgaattaattttttcaaaatatttatgacatcaaattgaccctaaaataagtgataaagctttaacgtggaatgacattaatttttccatgataaataaaacacttaaaacattttaatattaatattataatcagttacaactatgttcaattaatgcaataacttttaaataaatattaaaatattttttttctgttctccaataaagagatcttgttgcacggaaaaagtcacattcttatttagtaaaaaattataattattgtttgaaaaatatcattttcactgcagaaaatttgatccagctctacagatcatacttttattgtacaataatacaataaaaatattcatctgcaggaaatatcattttcattgtacaataatataaagataaatatataccagaaaagaaaaagaaactgatgtggcacaatgtattcactgaaagaatgcatattgtatttcacctttcaagcagcactaagaatatacttcttttattatacttgtgcatttactcaaccaccctcggtggagtaagaaagaagatagataaaagttttttttgacatttggtgaatctcttaattaaaaaaataaaataatccatttcctttatttaatttcttttttcccatctgtgaaattccaattctgcttcgcgctcctgtctataaattgacttagccaccacctcagtttccattcattcacttcttctctttataccccccctctcttttttgcgttcattctgttttcgtaagtactgttgtttttctcttctatttctttttttgtttgtgttgtttttttttcttccttatcgttgttctgcctctcctctgtttcggtgctctgttcaccacttccacgtgagaatgatcttccttctttgcatgttcattctctcgtgaccactggatcagactccatgttctgatccagggtctctctctaacgcctgtactttcatccatgaccaccttaaaaacaacatgggggtggtgctgttacactaactctgtttctggggtgctgtctttgttcaattttactcagaaaatatcttttcttggattctattcggtgtgtgggaacatgatcctgtcggtcggttgtttttaggttaatccttaactggttacaaggatctaacgcttgaatgcatgtcctgagttaaagaaacaaaagaagaacacacctagtacagcctggcctcgaaccaagaacttctttgttggtttctcattattactaaaataaaataaagtatacgttttcttttttctttgggatgaacggttcagacttatgagaagtttaagctaatcctgtagtggagtgttcaatttattttaaactttaaagcaatagctcaagcactaaacttctttttcaagttcaaccactttggtagcttgctaattgctgctattgttctaattaattaatgtaattattgtttaaaaaagaaaagttggtgacactggaataaaaaagtgtactatctggcaattattcttctgcagcaatgtttgaggttgaaatcttagtagaacaaagtagaagatctggtatttatattttttgtagacagatggtgggggtgggtggtaggccttgaaatccaatatagttttgtagaataattttattattttttttttttgctcacttgtttgtggtattgattttgtgatgactcaagattaatgatttaccttcatttttttcatggtgacatattatgtatattcttgatctgtttcttacacttctttttcgttgttgtagctgttgaagtctgcggccgcaccatggaaactggaggctttcacggctaccgcaagctccccaacaccaccgctgggttgaagctgtcagtgtcagacatgaacatgaacatgaggcagcagcaggtagcatcatcagatcagaactgcagcaaccacagtgcagcaggagaggagaacgaatgcacggtgagggagcaagacaggttcatgccaatcgctaacgtgatacggatcatgcgcaagattctccctccacacgcaaaaatctccgatgatgcaaaggagacaatccaagagtgcgtgtcggagtacatcagcttcatcaccggggaggcgaacgagcgttgccagagggagcaacggaagaccataaccgcagaggacgtgctttgggccatgagcaagcttggattcgacgactacatcgaaccgttgaccatgtaccttcaccgctaccgtgaacttgagggtgaccgcacctctatgaggggtgaaccactcgggaagaggactgtggaatacgccacgcttggtgttgctactgcttttgtccctccaccctatcatcaccacaatgggtactttggtgctgccatgcccatggggacttacgttagggaagcgccaccaaatacagcctcctcccatcaccaccaccaccaccaccaccaccatgctcgtggaatctccaatgctcatgaaccaaatgctcgctccatataagcggccgcatttcgcaccaaatcaatgaaagtaataatgaaaagtctgaataagaatacttaggcttagatgcctttgttacttgtgtaaaataacttgagtcatgtacctttggcggaaacagaataaataaaaggtgaaattccaatgctctatgtataagttagtaatacttaatgtgttctacggttgtttcaatatcatcaaactctaattgaaactttagaaccacaaatctcaatcttttcttaatgaaatgaaaaatcttaattgtaccatgtttatgttaaacaccttacaattaattggttggagaggaggaccaaccgatgggacaacattgggagaaagagattcaatggagatttggataggagaacaacattctttttcacttcaatacaagatgagtgcaacactaaggatatgtatgagactttcagaagctacgacaacatagatgagtgaggtggtgattcctagcaagaaagacattagaggaagccaaaatcgaacaaggaagacatcaagggcaagagacaggaccatccatctcaggaaaaggagctttgggatagtccgagaagttgtacaagaaattttttggagggtgagtgatgcattgctggtgactttaactcaatcaaaattgagaaagaaagaaaagggagggggctcacatgtgaatagaagggaaacgggagaattttacagttttgatctaatgggcatcccagctagtggtaacatattcaccatgtttaaccttcacgtacgagatccggccggccagatcctgca

SEQ ID NO: 79 - DNA, 13319 bp, artificial sequence
  plasmid pKR2120
ggcgtacgaacggccgcgcatgctgacttaatcagctaacgccactcgagggggggcccggtaccggcgcgccgttctatagtgtcacctaaatcgtatgtgtatgatacataaggttatgtattaattgtagccgcgttctaacgacaatatgtccatatggtgcactctcagtacaatctgctctgatgccgcatagttaagccagccccgacacccgccaacacccgctgacgcgccctgacgggcttgtctgctcccggcatccgcttacagacaagctgtgaccgtctccgggagctgcatgtgtcagaggttttcaccgtcatcaccgaaacgcgcgagacgaaagggcctcgtgatacgcctatttttataggttaatgtcatgaccaaaatcccttaacgtgagttttcgttccactgagcgtcagaccccgtagaaaagatcaaaggatcttcttgagatcctttttttctgcgcgtaatctgctgcttgcaaacaaaaaaaccaccgctaccagcggtggtttgtttgccggatcaagagctaccaactctttttccgaaggtaactggcttcagcagagcgcagataccaaatactgtccttctagtgtagccgtagttaggccaccacttcaagaactctgtagcaccgcctacatacctcgctctgctaatcctgttaccagtggctgctgccagtggcgataagtcgtgtcttaccgggttggactcaagacgatagttaccggataaggcgcagcggtcgggctgaacggggggttcgtgcacacagcccagcttggagcgaacgacctacaccgaactgagatacctacagcgtgagcattgagaaagcgccacgcttcccgaagggagaaaggcggacaggtatccggtaagcggcagggtcggaacaggagagcgcacgagggagcttccagggggaaacgcctggtatctttatagtcctgtcgggtttcgccacctctgacttgagcgtcgatttttgtgatgctcgtcaggggggcggagcctatggaaaaacgccagcaacgcggcctttttacggttcctggccttttgctggccttttgctcacatgttctttcctgcgttatcccctgattctgtggataaccgtattaccgcctttgagtgagctgataccgctcgccgcagccgaacgaccgagcgcagcgagtcagtgagcgaggaagcggaagagcgcccaatacgcaaaccgcctctccccgcgcgttggccgattcattaatgcaggttgatcagatctcgatcccgcgaaattaatacgactcactatagggagaccacaacggtttccctctagaaataattttgtttaactttaagaaggagatatacccatggaaaagcctgaactcaccgcgacgtctgtcgagaagtttctgatcgaaaagttcgacagcgtctccgacctgatgcagctctcggagggcgaagaatctcgtgctttcagcttcgatgtaggagggcgtggatatgtcctgcgggtaaatagctgcgccgatggtttctacaaagatcgttatgtttatcggcactttgcatcggccgcgctcccgattccggaagtgcttgacattggggaattcagcgagagcctgacctattgcatctcccgccgtgcacagggtgtcacgttgcaagacctgcctgaaaccgaactgcccgctgttctgcagccggtcgcggaggctatggatgcgatcgctgcggccgatcttagccagacgagcgggttcggcccattcggaccgcaaggaatcggtcaatacactacatggcgtgatttcatatgcgcgattgctgatccccatgtgtatcactggcaaactgtgatggacgacaccgtcagtgcgtccgtcgcgcaggctctcgatgagctgatgctttgggccgaggactgccccgaagtccggcacctcgtgcacgcggatttcggctccaacaatgtcctgacggacaatggccgcataacagcggtcattgactggagcgaggcgatgttcggggattcccaatacgaggtcgccaacatcttcttctggaggccgtggttggcttgtatggagcagcagacgcgctacttcgagcggaggcatccggagcttgcaggatcgccgcggctccgggcgtatatgctccgcattggtcttgaccaactctatcagagcttggttgacggcaatttcgatgatgcagcttgggcgcagggtcgatgcgacgcaatcgtccgatccggagccgggactgtcgggcgtacacaaatcgcccgcagaagcgcggccgtctggaccgatggctgtgtagaagtactcgccgatagtggaaaccgacgccccagcactcgtccgagggcaaaggaatagtgaggtacagcttggatcgatccggctgctaacaaagcccgaaaggaagctgagttggctgctgccaccgctgagcaataactagcataaccccttggggcctctaaacgggtcttgaggggttttttgctgaaaggaggaactatatccggatgctcgggcgcgccggtacccgggtaccgagctcactagacgcggtgaaattacctaattaacaccggtgtttaaacactagtaacggccgccagtgtgctggaattcgcccttcccaagctttgctctagatcaaactcacatccaaacataacatggatatcttccttaccaatcatactaattattttgggttaaatattaatcattatttttaagatattaattaagaaattaaaagattttttaaaaaaatgtataaaattatattattcatgatttttcatacatttgattttgataataaatatattttttttaatttcttaaaaaatgttgcaagacacttattagacatagtcttgttctgtttacaaaagcattcatcatttaatacattaaaaaatatttaatactaacagtagaatcttcttgtgagtggtgtgggagtaggcaacctggcattgaaacgagagaaagagagtcagaaccagaagacaaataaaaagtatgcaacaaacaaatcaaaatcaaagggcaaaggctggggttggctcaattggttgctacattcaattttcaactcagtcaacggttgagattcactctgacttccccaatctaagccgcggatgcaaacggttgaatctaacccacaatccaatctcgttacttaggggcttttccgtcattaactcacccctgccacccggtttccctataaattggaactcaatgctcccctctaaactcgtatcgcttcagagttgagaccaagacacactcgttcatatatctctctgctcttctcttctcttctacctctcaaggtacttttcttctccctctaccaaatcctagattccgtggttcaatttcggatcttgcacttctggtttgctttgccttgctttttcctcaactgggtccatctaggatccatgtgaaactctactctttctttaatatctgcggaatacgcgtttgactttcagatctagtcgaaatcatttcataattgcctttctttcttttagcttatgagaaataaaatcactttttttttatttcaaaataaaccttgggccttgtgctgactgagatggggtttggtgattacagaattttagcgaattttgtaattgtacttgtttgtctgtagttttgttttgttttcttgtttctcatacattccttaggcttcaattttattcgagtataggtcacaataggaattcaaactttgagcaggggaattaatcccttccttcaaatccagtttgtttgtatatatgtttaaaaaatgaaacttttgctttaaattctattataactttttttatggctgaaatttttgcatgtgtctttgctctctgttgtaaatttactgtttaggtactaactctaggcttgttgtgcagtttttgaagtataacaacagaagttcctattccgaagttcctattctctagaaagtataggaacttccactagtccatgaaaaagcctgaactcaccgcgacgtctgtcgagaagtttctgatcgaaaagttcgacagcgtctccgacctgatgcagctctcggagggcgaagaatctcgtgctttcagcttcgatgtaggagggcgtggatatgtcctgcgggtaaatagctgcgccgatggtttctacaaagatcgttatgtttatcggcactttgcatcggccgcgctcccgattccggaagtgcttgacattggggaattcagcgagagcctgacctattgcatctcccgccgtgcacagggtgtcacgttgcaagacctgcctgaaaccgaactgcccgctgttctgcagccggtcgcggaggccatggatgcgatcgctgcggccgatcttagccagacgagcgggttcggcccattcggaccgcaaggaatcggtcaatacactacatggcgtgatttcatatgcgcgattgctgatccccatgtgtatcactggcaaactgtgatggacgacaccgtcagtgcgtccgtcgcgcaggctctcgatgagctgatgctttgggccgaggactgccccgaagtccggcacctcgtgcacgcggatttcggctccaacaatgtcctgacggacaatggccgcataacagcggtcattgactggagcgaggcgatgttcggggattcccaatacgaggtcgccaacatcttcttctggaggccgtggttggcttgtatggagcagcagacgcgctacttcgagcggaggcatccggagcttgcaggatcgccgcggctccgggcgtatatgctccgcattggtcttgaccaactctatcagagcttggttgacggcaatttcgatgatgcagcttgggcgcagggtcgatgcgacgcaatcgtccgatccggagccgggactgtcgggcgtacacaaatcgcccgcagaagcgcggccgtctggaccgatggctgtgtagaagtactcgccgatagtggaaaccgacgccccagcactcgtccgagggcaaaggaatagtgaggtacctaaagaaggagtgcgtcgaagcagatcgttcaaacatttggcaataaagtttcttaagattgaatcctgttgccggtcttgcgatgattatcatataatttctgttgaattacgttaagcatgtaataattaacatgtaatgcatgacgttatttatgagatgggtttttatgattagagtcccgcaattatacatttaatacgcgatagaaaacaaaatatagcgcgcaaactaggataaattatcgcgcgcggtgtcatctatgttactagatcgatgtcgacccgggccctaggcgtctttccacaatacataactattaattaatcttaaataaataaaggataaaatatttttttttcttcataaagttaaaatatgttattttttgtttagatgtatattcgaataaatctaaatatatgataatgattttttatattgattaaacatataatcaatattaaatatgatatttttttatataggttgtacacataattttataaggataaaaaatatgataaaaataaattttaaatatttttatatttacgagaaaaaaaaatattttagccataaataaatgaccagcatattttacaaccttagtaattcataaattcctatatgtatatttgaaattaaaaacagataatcgttaagggaaggaatcctacgtcatctcttgccatttgtttttcatgcaaacagaaagggacgaaaaaccacctcaccatgaatcactcttcacaccatttttactagcaaacaagtctcaacaactgaagccagctctctttccgtttctttttacaacactttctttgaaatagtagtattttttttcacatgatttattaacgtgccaaaagatgcttattgaatagagtgcacatttgtaatgtactactaattagaacatgaaaaagcattgttctaacacgataatcctgtgaaggcgttaactccaaagatccaatttcactatataaattgtgacgaaagcaaaatgaattcacatagctgagagagaaaggaaaggttaactaagaagcaatacttcagcggccgcgcgagaaactttgtatgggcatggttatttctcacttctcaccctcctttactttcttatgctaaatcctccttcccctatatctccaccctcaacccctttttctcattataacttttggtgcctagatggtgtgtgtgtgtgcgcgcgagagatctgagctcaattttcctctctcaagtcctggtcatgctttgagggaaaagggttgaggaacttatgcatcttatatctctccacctccaggattttaagccctagttactcaacccttttccctcagaatatggcaattcaggcttttaattgctttcatttggtaccatcacttgcaagatttcagagtacaaggtgaacacacacatcttcctcttcatcaattctctagtttcatccttatcttttcattcacggtaactctcactaccctctttcatcttataagttataccgggggtgtgatgttgatgagtgtaaattaaatatatgtgatctctttctctggaaaaattttcagtgtgatatacataataatctcttaatctagagattttatggctttgttatatataagcggcgcaagggcgaattctgcagatatccatcacacttgggccgcttctagctagctagggtttgggtagtgagtgtaataaagttgcaaagtttttggttaggttacgttttgaccttattattatagttcaaagggaaacattaattaaaggggattatgaagaagagagtgtacctatgtggttgaggatcttactgggtgaattgagctgcttagctatggatcccacagttctacccatcaataagtgcttttgtggtagtcttgtggcttccatatctggggagcttcatttgcctttatagtattaaccttctccacataaatacactctcttcacccttctcttcttttctctcataataatttaaatttgttatagactctaaactttaaatgttttttttgaagtttttccgtttttctcttttgccatgatcccgttcttgctgtggagtaaccttgtccgaggtatgtgcatgattagatccatacttaatttgtgtgcatcacgaaggtgaggttgaaatgaactttgcttttttgaccttttaggaaagttcttttgttgcagtaatcaattttaattagttttaattgacactattacttttattgtcatctttgttagttttattgttgaattgagtgcatatttcctaggaaattctcttacctaacattttttatacagatctatgctcttggctcttgcccttactcttggccttgtgttggttatttgtctacatatttattgactggtcgatgagacatgtcacaattcttgggcttatttgttggtctaataaaaggagtgcttattgaaagatcaagacggagattcggttttatataaataaactaaagatgacatattagtgtgttgatgtctcttcaggataatttttgtttgaaataatatggtaatgtcttgtctaaatttgtgtacataattcttactgattttttggattgttggatttttataaacaaatctggggcccaagcggccgcatgagccgtaaaggttcaatacaacgagtgcttgttttcttagggacaagcattgtacttatgtatgattctgtgtaaccatgagtcttccacgttgtactaatgtgaagggcaaaaataaaacacagaacaagttcgtttttctcaaataatgtgaaggtagaaaatggaaccatgcctcctctcttgcatgtgatttaaaatattagcagatgacctaggaggccggcccagctgatgatcccggtgaagttcctattccgaagttcctattctccagaaagtataggaacttcactagagcttgcggccgacctgcaggtaaattgcagctgaaggacagtgaagggtgaatttatccatttaaaccattttctttttaacacatttcttatggtaatctcttctcactacactataaaaatggcttctcaatcccattttctacatcatcccattctattgagttttgtttatttgctttcacttttttttttatctgcctcttcccttaatttgcttgacttcttcttcacattttgctttgttttctcctccggcttccggtatttcaaattcaagatgagcaagttgaaatttataaatagaaatacagatattatttacaacgtcaaatctttggtattttcaatatttgaatggggtaaatttgtcatatagtcatcatcactgactacttatctaacctatttaatttggagcatattctttataaggtccctctcacggccaatgtctaattattgatatacagctcttgttttctagtgctgcttataatattatctacacatatatatggtactgcacactactactatatagtagtaagtaaactagcaacagccggggccaaactccaataactaggcattggggtttagttggtaatataaatataacatcaaaaagtctttgcttgtgacgaacatcacaatgcacccaccattgatgccacgacagacattgttaattttttttttaatttttaaaaaagaagcaattccaatagttctatattacaatctcacgtgatccaagcacaacgtttcattttttgtacatgctcgatatataaataatatttcattttatagtaaaatataatgacattttcgaatataatttttgaaatttcattttccaaatgaaatactaatattaatattaatgagattaccacaaatcatgttatgaatgaaataaagagttttggcattctaactttctttgaatagaacaaaatgtatacaacactctccatatatacacgatttattcagggatcatatacattctctcatgattaacatagtctgctttcttcacgtctaagcagataatttttggtccacaagataaaattatcattagtcgttttaattaattccttgagcatcaagcactaaaataattaaacttctccattaccaaaaaaaaaagataggtgattcagtaacatgtagtactagtactactgattttttttttcttttgattttaatgaatggttcgtatcgagcatcgagaaatccatttattaggtgtgtaatgtaatagtagtatttccttgattttcagtaataagatggattcttacatttatatctgtttgacagaaaatgttgtcaatgcatttcttgggcacaaagttttttgaaacatgaattaattttttcaaaatatttatgacatcaaattgaccctaaaataagtgataaagctttaacgtggaatgacattaatttttccatgataaataaaacacttaaaacattttaatattaatattataatcagttacaactatgttcaattaatgcaataacttttaaataaatattaaaatattttttttctgttctccaataaagagatcttgttgcacggaaaaagtcacattcttatttagtaaaaaattataattattgtttgaaaaatatcattttcactgcagaaaatttgatccagctctacagatcatacttttattgtacaataatacaataaaaatattcatctgcaggaaatatcattttcattgtacaataatataaagataaatatataccagaaaagaaaaagaaactgatgtggcacaatgtattcactgaaagaatgcatattgtatttcacctttcaagcagcactaagaatatacttcttttattatacttgtgcatttactcaaccaccctcggtggagtaagaaagaagatagataaaagttttttttgacatttggtgaatctcttaattaaaaaaataaaataatccatttcctttatttaatttcttttttcccatctgtgaaattccaattctgcttcgcgctcctgtctataaattgacttagccaccacctcagtttccattcattcacttcttctctttataccccccctctcttttttgcgttcattctgttttcgtaagtactgttgtttttctcttctatttctttttttgtttgtgttgtttttttttcttccttatcgttgttctgcctctcctctgtttcggtgctctgttcaccacttccacgtgagaatgatcttccttctttgcatgttcattctctcgtgaccactggatcagactccatgttctgatccagggtctctctctaacgcctgtactttcatccatgaccaccttaaaaacaacatgggggtggtgctgttacactaactctgtttctggggtgctgtctttgttcaattttactcagaaaatatcttttcttggattctattcggtgtgtgggaacatgatcctgtcggtcggttgtttttaggttaatccttaactggttacaaggatctaacgcttgaatgcatgtcctgagttaaagaaacaaaagaagaacacacctagtacagcctggcctcgaaccaagaacttctttgttggtttctcattattactaaaataaaataaagtatacgttttcttttttctttgggatgaacggttcagacttatgagaagtttaagctaatcctgtagtggagtgttcaatttattttaaactttaaagcaatagctcaagcactaaacttctttttcaagttcaaccactttggtagcttgctaattgctgctattgttctaattaattaatgtaattattgtttaaaaaagaaaagttggtgacactggaataaaaaagtgtactatctggcaattattcttctgcagcaatgtttgaggttgaaatcttagtagaacaaagtagaagatctggtatttatattttttgtagacagatggtgggggtgggtggtaggccttgaaatccaatatagttttgtagaataattttattattttttttttttgctcacttgtttgtggtattgattttgtgatgactcaagattaatgatttaccttcatttttttcatggtgacatattatgtatattcttgatctgtttcttacacttctttttcgttgttgtagctgttgaagtctgcggccgcatgaagaggtctccagcatcttcttgttcatcatctacttcctctgttgggtttgaagctcccattgaaaaaagaaggcctaagcatccaaggaggaataatttgaagtcacaaaaatgcaagcagaaccaaaccaccactggtggcagaagaagctctatctatagaggagttacaaggcataggtggacagggaggtttgaagctcacctatgggataagagctcttggaacaacattcagagcaagaagggtcgacaagtttatttgggggcatatgatactgaagaatctgcagcccgtacctatgaccttgcagcccttaaatactggggaaaagatgcaaccctgaatttcccgatagaaacttataccaaggagctcgaggaaatggacaaggtttcaagagaagaatatttggcttctttgcggcgccaaagcagtggcttttctagaggcctgtctaagtaccgtggggttgctaggcatcatcataatggtcgctgggaagcacgaattggaagagtatgcggaaacaagtacctctacttggggacatataaaactcaagaggaggcagcagtggcatatgacatggcagcaatagagtaccgtggagtcaatgcagtgaccaattttgacataagcaactacatggacaaaataaagaagaaaaatgaccaaacccaacaacaacaaacagaagcacaaacggaaacagttcctaactcctctgactctgaagaagtagaagtagaacaacagacaacaacaataaccacaccacccccatctgaaaatctgcacatgccaccacagcagcaccaagttcaatacaccccccatgtctctccaagggaagaagaatcatcatcactgatcacaattatggaccatgtgcttgagcaggatctgccatggagcttcatgtacactggcttgtctcagtttcaagatccaaacttggctttctgcaaaggtgatgatgacttggtgggcatgtttgatagtgcagggtttgaggaagacattgattttctgttcagcactcaacctggtgatgagactgagagtgatgtcaacaatatgagcgcagttttggatagtgttgagtgtggagacacaaatggggctggtggaagcatgatgcatgtggataacaagcagaagatagtatcatttgcttcttcaccatcatctacaactacagtttcttgtgactatgctctagatctagcggccgcatttcgcaccaaatcaatgaaagtaataatgaaaagtctgaataagaatacttaggcttagatgcctttgttacttgtgtaaaataacttgagtcatgtacctttggcggaaacagaataaataaaaggtgaaattccaatgctctatgtataagttagtaatacttaatgtgttctacggttgtttcaatatcatcaaactctaattgaaactttagaaccacaaatctcaatcttttcttaatgaaatgaaaaatcttaattgtaccatgtttatgttaaacaccttacaattaattggttggagaggaggaccaaccgatgggacaacattgggagaaagagattcaatggagatttggataggagaacaacattctttttcacttcaatacaagatgagtgcaacactaaggatatgtatgagactttcagaagctacgacaacatagatgagtgaggtggtgattcctagcaagaaagacattagaggaagccaaaatcgaacaaggaagacatcaagggcaagagacaggaccatccatctcaggaaaaggagctttgggatagtccgagaagttgtacaagaaattttttggagggtgagtgatgcattgctggtgactttaactcaatcaaaattgagaaagaaagaaaagggagggggctcacatgtgaatagaagggaaacgggagaattttacagttttgatctaatgggcatcccagctagtggtaacatattcaccatgtttaaccttcacgtacgagatccggccggccagatcctgca

SEQ ID NO: 80 - DNA, 1239 bp, Glycine max; identical to SEQ ID NO: 68

SEQ ID NO: 81 - protein, 412 aa, Glycine max; identical to SEQ ID NO: 69

SEQ ID NO: 82 - DNA, 702 bp, Glycine max; identical to SEQ ID NO: 63

SEQ ID NO: 83 - protein, 233 aa, Gkycine max; identical to SEQ ID NO: 64

SEQ ID NO: 84 - DNA, 21 bp, artificial sequence
  amiRNA
tgagggaaaagggttgaggaa

SEQ ID NO: 85 - DNA, 21 bp, artificial sequence
  ami RNA
tccacataaatacactctctt

SEQ ID NO: 86 - DNA, 5241 bp, Glycine max; identical to SEQ ID NO: 41

SEQ ID NO: 87 - DNA, 3132 bp, Glycine max; identical to SEQ ID NO: 42

SEQ ID NO: 88 - DNA, 2418 bp, Glycine max; identical to SEQ ID NO: 43

SEQ ID NO: 89 - protein, 805 aa, Glycine max; identical to SEQ ID NO: 44

SEQ ID NO: 90 - DNA, 313 bp, Glycine max; identical to SEQ ID NO: 45

SEQ ID NO: 91 - DNA, 3191 bp, Glycine max; identical to SEQ ID NO: 46

SEQ ID NO: 92 - DNA, 1768 bp, Glycine max; identical to SEQ ID NO: 54

SEQ ID NO: 93 - protein, 681 aa, Glycine max
ATGGAAACTGGAGGCTTTCACGGCTACCGCAAGCTCCCCAACACCACCGCTGGGTTGAAGCTGTCAGTGTCAGACATGAACATGAGGCAGCAGGTAGCATCATCAGATCACAGTGCAGCCACAGGAGAGGAGAACGAATGCACGGTGAGGGAGCAAGACAGGTTCATGCCAATCGCCAACGTGATTAGGATCATGCGCAAGATTCTCCCTCCACACGCAAAAATCTCGGACGATGCAAAAGAAACAATCCAAGAGTGCGTGTCTGAGTACATCAGCTTCATCACAGGTGAGGCGAACGAGCGTTGCCAGAGGGAGCAGCGGAAGACCATAACCGCAGAGGACGTGCTTTGGGCCATGAGCAAGCTTGGATTCGACGACTACATCGAACCGTTGACCATGTACCTTCACCGCTACCGTGAACTTGAGGGTGACCGCACCTCTATGAGGGGTGAACCACTCGGGAAGAGGACTGTGGAATACGCCACGCTTGGTGTTGCTACTGCTTTTGTCCCTCCACCCTATCATCACCACAATGGGTACTTTGGTGCTGCCATGCCCATGGGGACTTACGTTAGGGAAGCGCCACCAAATACAGCCTCCTCCCATCACCACCACCACCACCACCACCACCATGCTCGTGGAATCTCCAATGCTCATGAACCAAATGCTCGCTCCATATAA

SEQ ID NO: 94 - protein, 226 aa, Glycine max; identical to SEQ ID NO: 56

SEQ ID NO: 95 - protein, 1115 aa, Glycine max
GGAAACTGGAGGCTTTCATGGCTACCGCAAGCTCCCCAACACAACCTCTGGGTTGAAGCTGTCAGTGTCAGACATGAACATGAACATGAGGCAGCAGCAGGTAGCATCATCAGATCAGAACTGCAGCAACCACAGTGCAGCAGGAGAGGAGAACGAATGCACGGTGAGGGAGCAAGACAGGTTCATGCCAATCGCTAACGTGATACGGATCATGCGCAAGATTCTCCCTCCACACGCAAAAATCTCCGATGATGCAAAGGAGACAATCCAAGAGTGCGTGTCGGAGTACATCAGCTTCATCACCGGGGAGGCCAACGAGCGTTGCCAGAGGGAGCAGCGCAAGACCATAACCGCAGAGGACGTGCTTTGGGCAATGAGTAAGCTTGGATTCGACGACTACATCGAACCGTTAACCATGTACCTTCACCGCTACCGTGAGCTGGAGGGTGACCGCACCTCTATGAGGGGTGAACCGCTCGGGAAGAGGACTGTGGAATATGCCACGCTTGCTACTGCTTTTGTGCCGCCACCCTTTCATCACCACAATGGCTACTTTGGTGCTGCCATGCCCATGGGGACTTACGTTAGGGAAACGCCACCAAATGCTGCGTCATCTCATCACCATCATGGAATCTCCAATGCTCATGAACCAAATGCTCGCTCCATATAAAATTAATGAAGAGTACTGTTCAGTAGGAGAACAAGACTTCTTGGACTTGATTAGCTTAACTCTCAGTGATTGGTGTTAGAGTACTGTTGTTGAGGATGGTTAATTTTATAATTAAGGGCTGGGAATTGGGGAGTTAGTATATATTCCTAATCCTAATTATGTGCATCTTTAATTTATGGAATAACTTTGTTTTTTGTTTTAACTTCTGATAATTTGGATTTTCTGATGTTTAATGTGGTTTTGTCTATCCCTTATTAACAGTGCCAAGCTTAAGGTTTTAGCCATGCTCCAAAATGGAATACTTGTACTGTTATGTTGTTCTGGTAGTGATGGTGATGAAACCTGCAAGTTATGTTTATGTATAAAGCCACTATTGATCAAAATTAGAGAAATTATCATTTAATAAGTATCCTCCCATGTTAATTTTAAAAAAAAAAAAAAAAAA

SEQ ID NO: 96 - protein, 672 aa, Glycine max
ATGGAAACTGGAGGCTTTCATGGCTACCGCAAGCTCCCCAACACAACCTCTGGGTTGAAGCTGTCAGTGTCAGACATGAACATGAACATGAGGCAGCAGCAGGTAGCATCATCAGATCAGAACTGCAGCAACCACAGTGCAGCAGGAGAGGAGAACGAATGCACGGTGAGGGAGCAAGACAGGTTCATGCCAATCGCTAACGTGATACGGATCATGCGCAAGATTCTCCCTCCACACGCAAAAATCTCCGATGATGCAAAGGAGACAATCCAAGAGTGCGTGTCGGAGTACATCAGCTTCATCACCGGGGAGGCCAACGAGCGTTGCCAGAGGGAGCAGCGCAAGACCATAACCGCAGAGGACGTGCTTTGGGCAATGAGTAAGCTTGGATTCGACGACTACATCGAACCGTTAACCATGTACCTTCACCGCTACCGTGAGCTGGAGGGTGACCGCACCTCTATGAGGGGTGAACCGCTCGGGAAGAGGACTGTGGAATATGCCACGCTTGCTACTGCTTTTGTGCCGCCACCCTTTCATCACCACAATGGCTACTTTGGTGCTGCCATGCCCATGGGGACTTACGTTAGGGAAACGCCACCAAATGCTGCGTCATCTCATCACCATCATGGAATCTCCAATGCTCATGAACCAAATGCTCGCTCCATATAA

SEQ ID NO: 97 - protein, 223 aa, Glycine max; identical to SEQ ID NO: 59

SEQ ID NO: 98 - DNA, 702 bp, Glycine max; identical to SEQ ID NO: 63

SEQ ID NO: 99 - protein, 233 aa, Glycine max; identical to SEQ ID NO: 64

SEQ ID NO: 100 - DNA, 1239 bp, Glycine max; identical to SEQ ID NO: 68

SEQ ID NO: 101 - protein, 412 aa, Glycine max; identical to SEQ ID NO: 69

SEQ ID NO: 102 - DNA, 1128 bp, Glycine max
atgtttcctgtgtcttcaccatccatccgtcactcactgcttggacaatctctaaccaccaccaccacaccatggcaccaaaccctatgccacaaacttaaccctgagaaagagaaccaactactacagtcacagaaaaccaaaaaaacactgtgtgtgtgtgtttgtgtgtcaaaaaaaaaaaaccctaagctaatgatgatggatccgcgacagcgagagaagctacttcacaaaaccgaggcctgtgctttcgtggcaggtgttgttccggagctttcccttgtcaccgttccagggaacaacaacaacaccaacaacgttaacaacaacaacaacaacgtttctcattctcaatctcaccggaagaaaaggatggccagacaaagaagatccactaaccccactttgttgatgaaccctctcatcaacaacaacaacaacaagtctggttcttctcttccttcgccaagtactgcttcctcctcgcacgtgccactctcctcctcaactctcccgcccgcacgtgaaatcgatcaaagaaggttgagattccttttccagaaggagttaaagaacagtgatgttagctcccttaggagaatgatattgccaaagaaagcagcagaggctttccttccagctcttgaatccaaagaaggaattgtaatcagcatggatgatatagatggtcttcatgtatggagtttcaagtacaggttttggcctaacaataacagtcggatgtatgtacttgaaaatactggagactttgtcaacacacatggccttcgctttggagattccattttggtttaccaagatagtgaaaacaacaattatgttattcaggcgaaaaaggcttctgatcaggatgaatttatggaagaaactagtgataccatcaatgatatcttccttaatgattatgaagtgaacaaacctggttgcttcaatgtaacctatcctgcagtgaatgatacaggcatgtcattcatatatgagactaccttctcaaatgactcccctcttgattttttgggtggatcaatgaccaatttttcaaggattggaccagttgaaacctttggctctgttgagaatttgtcacttgatgacttctattaa

SEQ ID NO: 103 - protein, 375 aa, Glycine max
MFPVSSPSIRHSLLGQSLTTTTTPWHQTLCHKLNPEKENQLLQSQKTKKTLCVCVCVSKKKNPKLMMMDPRQREKLLHKTEACAFVAGVVPELSLVTVPGNNNNTNNVNNNNNNVSHSQSHRKKRMARQRRSTNPTLLMNPLINNNNNKSGSSLPSPSTASSSHVPLSSSTLPPAREIDQRRLRFLFQKELKNSDVSSLRRMILPKKAAEAFLPALESKEGIVISMDDIDGLHVWSFKYRFWPNNNSRMYVLENTGDFVNTHGLRFGDSILVYQDSENNNYVIQAKKASDQDEFMEETSDTINDIFLNDYEVNKPGCFNVTYPAVNDTGMSFIYETTFSNDSPLDFLGGSMTNFSRIGPVETFGSVENLSLDDFY

SEQ ID NO: 104 - DNA, 1515 bp, Glycine max
atggcgatttccgatgagcctgaaagtgtagccactgctctcaaccactcttccctgcgccgccgtccctccgccacctccaccgccggcctcttcaattcgcctgagacaaccaccgacagttccggtgatgacttggccaaggattctggttccgacgactccatcaacaacgacgacgccgccgtcaattcccaacagcaaaacgaaaaacaagacactgatttctccgtcctcaaattcgcctaccgtccttccgtccccgctcaccgcaaagtgaaggaaagtccgctcagctccgacactattttccgtcagagtcacgcgggcctcttcaacctttgtatagtagtccttgttgctgtgaatagccgactcatcattgagaatttaatgaagtatggttggttgatcaaatctggcttttggtttagtgcaaagtcattgagagactggccccttttcatgtgttgtctttctcttgtggtatttcctttcgctgcctttatggtggagaagttggcacaacggaagtgtatacccgaaccagttgttgttgtacttcatataatcattacctcaacttcgcttttctatccagttttagttattctcaagtgtgattctgcttttgtatcaggtgtcacgttaatgctgttttcttgtgttgtatggttaaaattggtgtcttttgcacatacaaactatgatatgagagcacttaccaaattagttgaaaagggagaagcactgctcgatactctgaacatggagtatccttacaacgtaaccttcaagagcttggcatatttcctgcttgcccctacattatgttaccagccaagctatcctcgcacaccttatattcgaaagggttggttgtttcgccaacttgtcaagctgatagtatttacaggagttatgggatttataatagaacaatatattaatcccatagtacaaaattcacagcatcctctcaagggaaaccttctttacgccaccgagagagttctgaagctttctgttccaaatttatatgtgtggctctgcatgttctattgctttttccacctttggttaaatatcgtggcagagcttcttcgatttggtgatcgtgaattctacaaggattggtggaatgccaaaactgtcgaagattattggaggatgtggaatatgcctgttcacaaatggatgatccgccacctatattttccatgtttaaggcacggtctaccaaaggctgctgctcttttaatttccttcctggtttctgctttattccatgagctgtgcattgctgttccttgccacatgttcaagttgtgggctttcggtggaattatgtttcaggttcctttggtcttgatcactaattatctgcaaaataaattcaaaaactcaatggttggaaatatgattttttggttcatattcagtatcgttggtcaacctatgtgtgtactgctatactaccatgacttgatgaataggaaaggcaaacttgactga

SEQ ID NO: 105 - protein, 504 aa, Glycine max
MAISDEPESVATALNHSSLRRRPSATSTAGLFNSPETTTDSSGDDLAKDSGSDDSINNDDAAVNSQQQNEKQDTDFSVLKFAYRPSVPAHRKVKESPLSSDTIFRQSHAGLFNLCIVVLVAVNSRLIIENLMKYGWLIKSGFWFSAKSLRDWPLFMCCLSLVVFPFAAFMVEKLAQRKCIPEPVVVVLHIIITSTSLFYPVLVILKCDSAFVSGVTLMLFSCVVWLKLVSFAHTNYDMRALTKLVEKGEALLDTLNMEYPYNVTFKSLAYFLLAPTLCYQPSYPRTPYIRKGWLFRQLVKLIVFTGVMGFIIEQYINPIVQNSQHPLKGNLLYATERVLKLSVPNLYVWLCMFYCFFHLWLNIVAELLRFGDREFYKDWWNAKTVEDYWRMWNMPVHKWMIRHLYFPCLRHGLPKAAALLISFLVSALFHELCIAVPCHMFKLWAFGGIMFQVPLVLITNYLQNKFKNSMVGNMIFWFIFSIVGQPMCVLLYYHDLMNRKGKLD

SEQ ID NO: 106 - DNA, 1545 bp, Yarrowia Lipolytica
atgactatcgactcacaatactacaagtcgcgagacaaaaacgacacggcacccaaaatcgcgggaatccgatatgccccgctatcgacaccattactcaaccgatgtgagaccttctctctggtctggcacattttcagcattcccactttcctcacaattttcatgctatgctgcgcaattccactgctctggccatttgtgattgcgtatgtagtgtacgctgttaaagacgactccccgtccaacggaggagtggtcaagcgatactcgcctatttcaagaaacttcttcatctggaagctctttggccgctacttccccataactctgcacaagacggtggatctggagcccacgcacacatactaccctctggacgtccaggagtatcacctgattgctgagagatactggccgcagaacaagtacctccgagcaatcatcaccaccatcgagtactttctgcccgccttcatgaaacggtctctttctatcaacgagcaggagcagcctgccgagcgagatcctctcctgtctcccgtttctcccagctctccgggttctcaacctgacaagtggattaaccacgacagcagatatagccgtggagaatcatctggctccaacggccacgcctcgggctccgaacttaacggcaacggcaacaacggcaccactaaccgacgacctttgtcgtccgcctctgctggctccactgcatctgattccacgcttcttaacgggtccctcaactcctacgccaaccagatcattggcgaaaacgacccacagctgtcgcccacaaaactcaagcccactggcagaaaatacatcttcggctaccacccccacggcattatcggcatgggagcctttggtggaattgccaccgagggagctggatggtccaagctctttccgggcatccctgtttctcttatgactctcaccaacaacttccgagtgcctctctacagagagtacctcatgagtctgggagtcgcttctgtctccaagaagtcctgcaaggccctcctcaagcgaaaccagtctatctgcattgtcgttggtggagcacaggaaagtcttctggccagacccggtgtcatggacctggtgctactcaagcgaaagggttttgttcgacttggtatggaggtcggaaatgtcgcccttgttcccatcatggcctttggtgagaacgacctctatgaccaggttagcaacgacaagtcgtccaagctgtaccgattccagcagtttgtcaagaacttccttggattcacccttcctttgatgcatgcccgaggcgtcttcaactacgatgtcggtcttgtcccctacaggcgacccgtcaacattgtggttggttcccccattgacttgccttatctcccacaccccaccgacgaagaagtgtccgaataccacgaccgatacatcgccgagctgcagcgaatctacaacgagcacaaggatgaatatttcatcgattggaccgaggagggcaaaggagccccagagttccgaatgattgagtaa

SEQ ID NO: 107 - protein, 514 aa, Yarrowia lipolytica
MTIDSQYYKSRDKNDTAPKIAGIRYAPLSTPLLNRCETFSLVWHIFSIPTFLTIFMLCCAIPLLWPFVIAYVVYAVKDDSPSNGGVVKRYSPISRNFFIWKLFGRYFPITLHKTVDLEPTHTYYPLDVQEYHLIAERYWPQNKYLRAIITTIEYFLPAFMKRSLSINEQEQPAERDPLLSPVSPSSPGSQPDKWINHDSRYSRGESSGSNGHASGSELNGNGNNGTTNRRPLSSASAGSTASDSTLLNGSLNSYANQIIGENDPQLSPTKLKPTGRKYIFGYHPHGIIGMGAFGGIATEGAGWSKLFPGIPVSLMTLTNNFRVPLYREYLMSLGVASVSKKSCKALLKRNQSICIVVGGAQESLLARPGVMDLVLLKRKGFVRLGMEVGNVALVPIMAFGENDLYDQVSNDKSSKLYRFQQFVKNFLGFTLPLMHARGVFNYDVGLVPYRRPVNIVVGSPIDLPYLPHPTDEEVSEYHDRYIAELQRIYNEHKDEYFIDWTEEGKGAPEFRMIE

SEQ ID NO: 108 - DNA, 837 bp, Zea mays
atggactccagcagcttcctccctgccgccggcgcggagaatggctcggcggcgggcggcgccaacaatggcggcgctgctcagcagcatgcggcgccggcgatccgcgagcaggaccggctgatgccgatcgcgaacgtgatccgcatcatgcggcgcgtgctgccggcgcacgccaagatctcggacgacgccaaggagacgatccaggagtgcgtgtcggagtacatcagcttcatcacgggggaggccaacgagcggtgccagcgggagcagcgcaagaccatcaccgccgaggacgtgctgtgggccatgagccgcctcggcttcgacgactacgtcgagccgctcggcgcctacctccaccgctaccgcgagttcgagggcgacgcgcgcggcgtcgggctcgtcccgggggccgccccatcgcgcggcggcgaccaccacccgcactccatgtcgccagcggcgatgctcaagtcccgcgggccagtctccggagccgccatgctaccgcaccaccaccaccaccacgacatgcagatgcacgccgccatgtacgggggaacggccgtgcccccgccggccgggcctcctcaccacggcgggttcctcatgccacacccacagggtagtagccactacctgccttacgcgtacgagcccacgtacggcggtgagcacgccatggctgcatactatggaggcgccgcgtacgcgcccggcaacggcgggagcggcgacggcagtggcagtggcggcggtggcgggagcgcgtcgcacacaccgcagggcagcggcggcttggagcacccgcacccgttcgcgtacaagtag

SEQ ID NO: 109 - protein, 278 aa, Zea mays
MDSSSFLPAAGAENGSAAGGANNGGAAQQHAAPAIREQDRLMPIANVIRIMRRVLPAHAKISDDAKETIQECVSEYISFITGEANERCQREQRKTITAEDVLWAMSRLGFDDYVEPLGAYLHRYREFEGDARGVGLVPGAAPSRGGDHHPHSMSPAAMLKSRGPVSGAAMLPHHHHHHDMQMHAAMYGGTAVPPPAGPPHHGGFLMPHPQGSSHYLPYAYEPTYGGEHAMAAYYGGAAYAPGNGGSGDGSGSGGGGGSASHTPQGSGGLEHPHPFAYK

SEQ ID NO: 110 - DNA, 1188 bp, Zea mays
atggagagatctcaacggcagtctcctccgccaccgtcgccgtcctcctcctcgtcctccgtctccgcggacaccgtcctcgtccctcccggaaagaggcggagggcggcgacggccaaggccggcgccgagcctaataagaggatccgcaaggaccccgccgccgccgccgcggggaagaggagctccgtctacaggggagtcaccaggcacaggtggacgggcaggttcgaggcgcatctctgggacaagcactgcctcgccgcgctccacaacaagaagaaaggcaggcaagtctacctgggggcgtatgacagcgaggaggcagctgctcgtgcctatgacctcgcagctctcaagtactggggtcctgagactctgctcaacttccctgtggaggattactccagcgagatgccggagatggaggccgtgtcccgggaggagtacctggcctccctccgccgcaggagcagcggcttctccaggggcgtctccaagtacagaggcgtcgccaggcatcaccacaacgggaggtgggaggcacggattgggcgagtctttgggaacaagtacctctacttgggaacatttgacactcaagaagaggcagccaaggcctatgaccttgcggccattgaataccgtggcgtcaatgctgtaaccaacttcgacatcagctgctacctggaccacccgctgttcctggcacagctccaacaggagccacaggtggtgccggcactcaaccaagaacctcaacctgatcagagcgaaaccggaactacagagcaagagccggagtcaagcgaagccaagacaccggatggcagtgcagaacccgatgagaacgcggtgcctgacgacaccgcggagcccctcaccacagtcgacgacagcatcgaagagggcttgtggagcccttgcatggattacgagctagacaccatgtcgagaccaaactttggcagctcaatcaatctgagcgagtggttcgctgacgcagacttcgactgcaacatcggatgcctgttcgatgggtgttctgcggctgacgaaggaagcaaggatggtgtaggtctggcagatttcagtctgtttgaggcaggtgatgtccagctgaaggatgttctttcggatatggaagaggggatacaacctccagcgatgatcagtgtgtgcaactaa

SEQ ID NO: 111 - protein, 395 aa, Zea mays
MERSQRQSPPPPSPSSSSSSVSADTVLVPPGKRRRAATAKAGAEPNKRIRKDPAAAAAGKRSSVYRGVTRHRWTGRFEAHLWDKHCLAALHNKKKGRQVYLGAYDSEEAAARAYDLAALKYWGPETLLNFPVEDYSSEMPEMEAVSREEYLASLRRRSSGFSRGVSKYRGVARHHHNGRWEARIGRVFGNKYLYLGTFDTQEEAAKAYDLAAIEYRGVNAVTNFDISCYLDHPLFLAQLQQEPQVVPALNQEPQPDQSETGTTEQEPESSEAKTPDGSAEPDENAVPDDTAEPLTTVDDSIEEGLWSPCMDYELDTMSRPNFGSSINLSEWFADADFDCNIGCLFDGCSAADEGSKDGVGLADFSLFEAGDVQLKDVLSDMEEGIQPPAMISVCN

SEQ ID NO: 112 - protein, 64 aa, Artificial Sequence
  Lec1 conserved amino acid sequence motif
  misc_feature (5)..(6): Xaa can be any naturally occurring amino acid
  misc_feature (9)..(9): Xaa can be any naturally occurring amino acid
  misc_feature (13)..(13): Xaa can be any naturally occurring amino acid
  misc_feature (18)..(19): Xaa can be any naturally occurring amino acid
  misc_feature (22)..(23): Xaa can be any naturally occurring amino acid
  misc_feature (33)..(33): Xaa can be any naturally occurring amino acid
  misc_feature (41)..(41): Xaa can be any naturally occurring amino acid
  misc_feature (45)..(45): Xaa can be any naturally occurring amino acid
  misc_feature (47)..(47): Xaa can be any naturally occurring amino acid
  misc_feature (51)..(51): Xaa can be any naturally occurring amino acid
  misc_feature (54)..(57): Xaa can be any naturally occurring amino acid
  misc_feature (61)..(63): Xaa can be any naturally occurring amino acid
REQDXXMPXANVXRIMRXXLPXXAKISDDAKEXIQECVSEXISFXTXEANXRCXXXXRKTXXXE

SEQ ID NO: 113 - DNA, 14 bp, Artificial Sequence
  AW Box sequence
  misc_feature (2)..(2): n is a, c, g, or t
  misc_feature (4)..(4): n is a, c, g, or t
  misc_feature (6)..(12): n is a, c, g, or t
cntngnnnnnnncg

SEQ ID NO: 114 - DNA, 2418 bp, Medicago truncatula
atggctaccgaacgtttgactcgtgttcatagcctcaaggagaggcttgatgaaaccttaactgctaataggaatgaaattttggcccttctttcaaggcttgaagcaaagggaaagggaattttgcaacaccatcaagtgattgctgagtttgaggaaattcctgaagatagtagacagaagttgactgatggtgcatttggtgaagttttgagatccacacaggaagcaatagttttgccaccatgggttgcacttgctgttcgtccaaggccaggtatttgggagtatctgagagtaaatgtgcatgctcttgttgttgaaaatttgcaacctgctgagtttctcaaattcaaggaagaacttgttgatggaagtgctaatggaaactttgtgcttgagttggactttgaaccatttactgcatctttccctcgtcctactctcaacaagtcaattggaaatggtgtgcaattccttaatcgccacctttctgctaaactcttccatgacaaggagagtttacatccacttttggaatttctcagacttcacagctacaagggaaagacattgatgttgaatgacagaattcaaaaccctgattctcttcaacatgttctgaggaaagctgaagagtatctaagcacaattgatcctgaaacaccatactcagaatttgaacacaggttccaggagattggtttggagagaggttggggagacaccgcagagcgcgtcctcgagtccatccaacttctcttggatcttctcgaggctcccgacccttgcacccttgagactttccttgatagaatccccatggtctttaatgttgtcatcctttctcctcatggttactttgctcaagatgatgtcttgggataccctgatactggaggccaggttgtttacatcttggatcaagttcgtgccttggagagcgagatgctcagtcgcattaagaaacaaggcttggatatcatccctcgcattctcattatcacccgtcttctccccgatgcagtcggaacgacttgtggccaacgacttgagaaggtctacggaactgagcattgccacattcttcgagttcccttcagagatacgaagggaattgtccgcaagtggatctcacgatttgaagtctggccatatctagaaacttacactgaggatgttgctcatgagcttgccaaagagttgcaaggcaaaccagatctgattgttggaaactacagtgatggaaacattgttgcctctttgttggcacataaattaggtgtcactcagtgtaccattgctcatgcactcgagaagactaagtaccccgaatccgacatttactggaaaaaattcgaagagaagtatcacttctcctgccaatttaccgctgatcttttcgcaatgaaccacacagatttcatcatcactagtaccttccaagagattgctggaagcaaggacaaggttggacagtatgagagtcacactgcctttactcttccaggactctaccgtgtcgtgcacggtattgatgtctttgatccaaagttcaacattgtatctccaggagctgatcagaccatttacttcccttacaccgaaactagccgccgattgacatccttctaccctgaaatcgaagagcttctttacagctcagttgagaatgaagagcacatatgtgtgctgaaggaccgcaacaagccaattatcttcaccatggcaaggttggaccgtgtgaagaacattacaggacttgttgagtggtacggcaagaatgccaagcttcgtgagttggtgaaccttgttgttgttgccggagacaggaggaaggagtcaaaggacttggaagagatagctgagatgaagaagatgtatggcctaatcgagacctacaagttgaatggccaattcagatggatttcctctcagatgaaccgtgtcagaaacggagagctgtaccgtgtgatttgtgacaccaagggagctttcgtgcaacctgctgtgtatgaagctttcggtttgacagttgttgaggccatggctactggattaccaacatttgcaactcttaatggtggccctgctgagatcattgtccatggcaaatctggattccacattgatccttaccatggcgaccgtgctgctgatctcctcgttgaattctttgagaaggtcaaggttgatccatctcactgggacaagatctctcaaggtggtctccaacgtattgaagagaagtacacatggacaatatactctcagaggcttcttacactcactggtgtctatggcttctggaagcatgtgtctaacctcgaccgtcttgagagccgccgctatcttgagatgttctatgctctcaagtaccgcaaattggctgagtctgtgcccctagctgttgagtaa

SEQ ID NO: 115 - protein, 805 aa, Medicago truncatula
MATERLTRVHSLKERLDETLTANRNEILALLSRLEAKGKGILQHHQVIAEFEEIPEDSRQKLTDGAFGEVLRSTQEAIVLPPWVALAVRPRPGIWEYLRVNVHALVVENLQPAEFLKFKEELVDGSANGNFVLELDFEPFTASFPRPTLNKSIGNGVQFLNRHLSAKLFHDKESLHPLLEFLRLHSYKGKTLMLNDRIQNPDSLQHVLRKAEEYLSTIDPETPYSEFEHRFQEIGLERGWGDTAERVLESIQLLLDLLEAPDPCTLETFLDRIPMVFNVVILSPHGYFAQDDVLGYPDTGGQVVYILDQVRALESEMLSRIKKQGLDIIPRILIITRLLPDAVGTTCGQRLEKVYGTEHCHILRVPFRDTKGIVRKWISRFEVWPYLETYTEDVAHELAKELQGKPDLIVGNYSDGNIVASLLAHKLGVTQCTIAHALEKTKYPESDIYWKKFEEKYHFSCQFTADLFAMNHTDFIITSTFQEIAGSKDKVGQYESHTAFTLPGLYRVVHGIDVFDPKFNIVSPGADQTIYFPYTETSRRLTSFYPEIEELLYSSVENEEHICVLKDRNKPIIFTMARLDRVKNITGLVEWYGKNAKLRELVNLVVVAGDRRKESKDLEEIAEMKKMYGLIETYKLNGQFRWISSQMNRVRNGELYRVICDTKGAFVQPAVYEAFGLTVVEAMATGLPTFATLNGGPAEIIVHGKSGFHIDPYHGDRAADLLVEFFEKVKVDPSHWDKISQGGLQRIEEKYTWTIYSQRLLTLTGVYGFWKHVSNLDRLESRRYLEMFYALKYRKLAESVPLAVE

SEQ ID NO: 116 - DNA, 3265 bp, Medicago truncatula
cagatccgaagacatgggtattccagagacttaaatatagtcatatgtgtaggctttaatactttgccgttttatgctattaacatggatgctgtgagtttgttcacagattcatcctttttgtttttggcgaattttcattgcatcgatctatcaatttgaatgaatgaatatcacttatttttgtaaaaaaaagaagataaaaaaaattaattatattcttaataatactcttatttaattattgtatctcaattattctaattattctatctatataaatatattagttattgaaacttatttataataaaaagcatgacattttggaattttcttaaaatgtaagcataactacaaacgagactaagacgtagaaatagctagaagttaggaacaagagaagggttaattgcattatcatgaattctacattgaagtgtctcatactctcatctcatataataagatagacttagaaaataagtactgtactaataataatatgtattgttataagattatctcgtctaaagaactagcattttttttttgttttttcataattaagttatctcaattggaggttatgtgtatcagacattaaatataaataaattaatggtcagtttgagatcttggaatgtgtttctttaaagattttatgttcaatttttttttgtgtgtcaaattcggtggacaagttcatactgagctttgctctggcttagaacgggacctcgcaaatgggcagtgggatgaggctactctaattagtcggtcatagatcggatatcgaattttataaaaataatataaataaacgattcaaatgaaatcgaaatattagttcctcaagttgtaaatgtctagctcccttatatttcatctaatcttgttgataggactgatattttaaaatgagttctgtttgtttttatttaattatttctaaaatgagttttgtttgcttgacttcgtttacctcgttttcttctccgggttcgggcatttcaaaaataaggtatatcaacttgatgtttatttataaattgaagttcatagtatacgatttttttttgtaatataaagttccatatatgatttatcgccaggtcttggtattttcgacatttgcatggggttaaaataaatgtcacatatagtcacatatttttttttgatgaaatgtcacatagtcatcatcattgtctagtttgctgacttatttaattaggagcatattctttattaagtaccccttacggttgcattatctaattattgatatgttcaatttgtttcttagtgctgttttgtttataatattatccgaacactatacactacaatcatcgtacataaattactcaattgcaacaaaaaacaagaggggtcagtctctgttgatgcattatccaataacaagaggaattagaggattagtaggtaaaccaaagttaaataaatataacaacaggaaaaaagtctttgcttgtgacgaacaccaccataatgcacccccacaatttaattttttcaccaagaaaaaatcattatagacaactacactcatgacacatatttaacttctgtgcattgctgctaatcagtttatttaaatcactattccctcaacaaaaaaaaagtttatttaaatcactagattaattgtaataaaaagtcactttaataattaatttatgcaatgtctctatcaattgaactaaacttacggagataaatatgtagtatttttgaattcaacattctttatcgaaagatgaattttattttaaatttattttgtaatgtactagtaatttaatttcaaaacatattaatgaattaaattgtcctaatacaaatatattgaaaattgttaggttggacacatgatcaaaattcaaacccaactcacctatttacaaaagaaaaattcttaaagaaaaacattactatccatataggaaaaagtataatttttattatcagagtaaatcctatccagataaaaaaaaaaactgaaccgcactttaagtaattgctaaaagtatgcatattctagctttatttcaatttttaagcaacatttagaattttgtcaaaaaagataaagcaacatttaaaaaagaatatacttcttatattcgctatgcatttatttaactttaggcttgaggaataagataagacttgtcaaaaaaaaaaaaaaacaaaagattgggaagtaagaaaaagataggtaaagatttttgacctttggtgaacgtcttaaactaaaataaaataaaataaaacaaaataaataaatttcattggtcaatcttttttcctttaactaattaattaatataagtgccacatcagcatgtgaaattcccattatgtatctcctttcttgtctataaattgagttagccaccaccttattttccattcattcatcccttctctttacacccccccctcttttttgcgttcactctgttttcttttcataggtattctattctattctttctttattatttttctttctttgttactctgtttttcccctgtttctccatcaccactgccacgtcactattccaccacctctgcatgttctttcttttgtgatcataagatcaaacactataccatgattctgatctcatgatatgagtcacacatgttttcctctgcatgaaaaaatagtgctgagtttttttttttagtatagttctgtttttgttgaattttattcatgttctgttcttgtgacactatacacggtttcactttgaagaacaaggttctgtcgttattattcaagatacttgttcaagaaacttcatgacacaacatgcacggccttgattaaataaaaaacaaaaacaaaaacaaaactttatacagcctggcatagaacaaagagattctttctttgttcgtttcttaaataaattttgtttttaattttatggataaacaaacactaacttatgaggtttagtaatgttaaaattctaaaaggaaattattattctcatgcactgtttatggttgaaatcttagttgaaaaaagtggaagatttggtattaatattttatttgacaggtggttggtcatggtgggtcgtaggtctttgttgaaaattcataaaccaattcagtttttttaaatgtttgtttaattgattaatttttgtactatgatgttgatctgttacttaaagtgatgatgaattatttttgttgttgcagttgaagattttca

SEQ ID NO: 117 - DNA, 3313 bp, Medicago truncatula
cagatccgaagacatgggtattccagagacttaaatatagtcatatgtgtaggctttaatactttgtcgttttatgctattaacatggatgctgtgagtttgttcacagattcatcctttttgtttttggcgaattttcattgcatcgatctatcaatttgaatgaatgaatatcacttatttttgtaaaaaaaagaagataaaaaaaattaattatattcttaataatactcttatttaattattgtatctcaattattctaattattctatctatataaatatattagttattgaaacttatttataataaaaagcatgacattttggaattttcttaaaatgtaagcataactacaaacgagactaagacgtagaaatagctagaagttaggaacaagagaagggttaattgcattatcatgaattctacattgaagtgtctcatactctcatctcatataataagatagacttagaaaataagtcctgtactaataataatatgtattgttataagattatctcgtctaaagaactagcattttttttttttttcataattaagttatctcaattggaggttatgtgtatcagacattaaatataaataaattaatggtcaatttgagatcttggaatgtgcttctttaaagattttatgttcaatttttttttgtgtgtcaaattcggtggacaagttcatactgaactttgctctggcttagaacgggacctcgcaaatgggcagtgggatgaggctactctaattagtcggtcctagatcggatatcgagttttataaaaataatataaataaacgattcaaatgaaatcgaaatattagttcctcaagttgtaaatgtctagctcccttatatttcatctagtcttgttgataggactgatattttaaaatgagttctgtttgtttttatttaattatttctaaaatgagttttgtttgcttgacttcgtttacctcgttttcttctccgggttcgggcatttcaaaaataaggtatatcaacttgatgtttatttataaattgaagttcatagtatacgatttttttttgtaatataaagttccatatatgatttatcgccaggtcttggtattttcgacatttgcatggggttaaaataaatgtcacatataatcacatatttttttttgatgaaatgtcacatagtcatcatcattgtctagtttgctgacttatttaattaggagcatattctttattaagtaccccttacggttgcattatctaattattgatatgttcaatttgtttcttagtgctgttttgtttataatattatccgaacactatacactacaatcatcgtacataaattactcaattgcaacaaaaaacaagaggggtcagtctctgttgatgcattatccaataacaagaggaattagaggattagtaggtaaaccaaagttaaataaatataacaacaggaaaaaagtctttgcttgtgacgaacaccaccataatgcacccccacaatttaatttttcaccaagaaaaaatcattatagacaactacactcatgacacatatttaacttctgtgcattgctgctaatcagtttatttaaatcactattccctcaacaaaaaaaaagtttatttaaatcactagattaattgtaataaaaagtcactttaataattagtttatgcaatgtctctaccaattgaactaaacttacggagataaatatgtagtatttttgaattcaacattctttatcgaaagatgaattttattttaaatttattttgtaatgtactagtaatttaatttcaaaacatattaatgaattaaattgattttagaatatgcaataaaattgtcctaatacaaatatattgaaaattgttaggttggacacatgatcaaaattcaaacccaactcacctatttagaaaagaaaaattcttaaagaaaaacattactatccatataggaaaaagtataatttttattatcagagtaaatcctatccagataaaaaaaaaactgaaccgcactttaagtaattgctaaaagtatgcatattctagctttatttcaatttttaagcaacatttagaattttgtcaaaaaagataaagcaacatttaaaaaagaatatacttcttatattcgctatgcatttatttaactttaggcttgaggaataagataagacttgtaggcttgaggaataagataagacttgtcaaaaaaaaaaaaaaaacaaaagattgggaagtaagaaaaagataggtaaagatttttgacctttggtgaacgtcttaaactaaaataaaataaaataaaacaaaataaataaatttcattggtcaatcttttttcctttaactaattaattaatataagtgccacatcagcatgtgaaattcccattatgtatctcgtttcttgtctataaattgagttagccaccaccttattttccattcattcatcccttctctttacacccccccctcttttttgcgttcactctgttttcttttcataggtattctattctattctttctttattatttttctttctttgttactctgtttttcccctgtttctccatcaccactgccacgtcactattccaccacctctgcatgttctttcttttgtgatcataagatcaaacactataccatgattctgatctcatgatatgagtcacacatgttttcctctgcatgaaaaaatagtgctgagttttttttttttagtatagttctgtttttgttgaattttattcatgttctgttcttgtgacactatacacggtttcactttgaagaacaaggttctgtcgttattattcaagatacttgttcaagaaacttcatgacacaacatgcatggccttgattaaataaaaaacaaaaacaaaaacaaaactttatacagcctggcatagaacaaagagattctttctttgttcgtttcttaaataaattttgtttttaattttatggataaacaaacactaacttatgaggtttagtaatgttaaaattctaaaaggaaattattattctcatgcactgtttatggttgaaatcttagttgaaaaaagtggaagatttggtattaatattttatttgacaggtggttggtcatggtgggtcgtaggtctttgttgaaaattcataaaccaattcagtttttttaaatgtttgtttaattgattaatttttgtactatgatgttgatctgttacttaaagtgatgatgaattatttttgttgttgcagttgaagattttca

SEQ ID NO: 118 - DNA, 1164 bp, Glycine max
atgggtctagcaaaggaaacaacaatgggaggtagaggtcgtgtggccaaagtggaagttcaagggaagaagcctctctcaagggttccaaacacaaagccaccattcactgttggccaactcaagaaagcaattccaccacactgctttcagcgctccctcctcacttcattctcctatgttgtttatgacctttcatttgccttcattttctacattgccaccacctacttccacctccttcctcaacccttttccctcattgcatggccaatctattgggttctccaaggttgccttctcactggtgtgtgggtgattgctcacgagtgtggtcaccatgccttcagcaagtaccaatgggttgatgatgttgtgggtttgacccttcactcaacacttttagtcccttatttctcatggaaaataagccatcgccgccatcactccaacacaggttcccttgaccgtgatgaagtgtttgtcccaaaaccaaaatccaaagttgcatggttttccaagtacttaaacaaccctctaggaagggctgtttctcttctcgtcacactcacaatagggtggcctatgtatttagccttcaatgtctctggtagaccctatgatagttttgcaagccactaccacccttatgctcccatatattctaaccgtgagaggcttctgatctatgtctctgatgttgctttgttttctgtgacttactctctctaccgtgttgcaaccctgaaagggttggtttggctgctatgtgtttatggggtgcctttgctcattgtgaacggttttcttgtgactatcacatatttgcagcacacacactttgccttgcctcattacgattcatcagaatgggactggctgaagggagctttggcaactatggacagagattatgggattctgaacaaggtgtttcatcacataactgatactcatgtggctcaccatctcttctctacaatgccacattaccatgcaatggaggcaaccaatgcaatcaagccaatattgggtgagtactaccaatttgatgacacaccattttacaaggcactgtggagagaagcgagagagtgcctctatgtggagccagatgaaggaacatccgagaagggcgtgtattggtacaggaacaagtattga

SEQ ID NO: 119 - protein, 387 aa, Glycine max
MGLAKETTMGGRGRVAKVEVQGKKPLSRVPNTKPPFTVGQLKKAIPPHCFQRSLLTSFSYVVYDLSFAFIFYIATTYFHLLPQPFSLIAWPIYWVLQGCLLTGVWVIAHECGHHAFSKYQWVDDVVGLTLHSTLLVPYFSWKISHRRHHSNTGSLDRDEVFVPKPKSKVAWFSKYLNNPLGRAVSLLVTLTIGWPMYLAFNVSGRPYDSFASHYHPYAPIYSNRERLLIYVSDVALFSVTYSLYRVATLKGLVWLLCVYGVPLLIVNGFLVTITYLQHTHFALPHYDSSEWDWLKGALATMDRDYGILNKVFHHITDTHVAHHLFSTMPHYHAMEATNAIKPILGEYYQFDDTPFYKALWREARECLYVEPDEGTSEKGVYWYRNKY

SEQ ID NO: 120 - DNA, 1164 bp, Glycine max
atgggtctagcaaaggaaacaataatgggaggtggaggccgtgtggccaaagttgaaattcagcagaagaagcctctctcaagggttccaaacacaaagccaccattcactgttggccaactcaagaaagccattccaccgcactgctttcagcgttccctcctcacttcattgtcctatgttgtttatgacctttcattggctttcattttctacattgccaccacctacttccacctcctccctcaccccttttccctcattgcatggccaatctattgggttctccaaggttgcattcttactggcgtgtgggtgattgctcacgagtgtggtcaccatgccttcagcaagtacccatgggttgatgatgttatgggtttgaccgttcactcagcacttttagtcccttatttctcatggaaaataagccatcgccgccaccactccaacacgggttcccttgaccgtgatgaagtgtttgtcccaaaaccaaaatccaaagttgcatggtacaccaagtacctgaacaaccctctaggaagggctgcttctcttctcatcacactcacaatagggtggcctttgtatttagccttcaatgtctctggcagaccctatgatggttttgctagccactaccacccttatgctcccatatattcaaatcgtgagaggcttttgatctatgtctctgatgttgctttgttttctgtgacttacttgctctaccgtgttgcaactatgaaagggttggtttggctgctatgtgtttatggggtgccattgctcattgtgaacggttttcttgtgaccatcacatatctgcagcacacacactatgccttgcctcactatgattcatcagaatgggattggctgaggggtgctttggcaactatggacagagattatggaattctgaacaaggtgtttcaccacataactgatactcatgtggctcaccatcttttctctacaatgccacattaccatgcaacggaggcaaccaatgcaatgaagccaatattgggtgagtactaccgatttgatgacacaccattttacaaggcactgtggagagaagcaagagagtgcctctatgtggagccagatgaaggaacatccgagaagggcgtgtattggtacaggaacaagtattga

SEQ ID NO: 121 - protein, 387 aa, Glycine max
MGLAKETIMGGGGRVAKVEIQQKKPLSRVPNTKPPFTVGQLKKAIPPHCFQRSLLTSLSYVVYDLSLAFIFYIATTYFHLLPHPFSLIAWPIYWVLQGCILTGVWVIAHECGHHAFSKYPWVDDVMGLTVHSALLVPYFSWKISHRRHHSNTGSLDRDEVFVPKPKSKVAWYTKYLNNPLGRAASLLITLTIGWPLYLAFNVSGRPYDGFASHYHPYAPIYSNRERLLIYVSDVALFSVTYLLYRVATMKGLVWLLCVYGVPLLIVNGFLVTITYLQHTHYALPHYDSSEWDWLRGALATMDRDYGILNKVFHHITDTHVAHHLFSTMPHYHATEATNAMKPILGEYYRFDDTPFYKALWREARECLYVEPDEGTSEKGVYWYRNKY

SEQ ID NO: 122 - DNA, 1152 bp, Glycine max
atgggggctggtggccgaactgctgttcctcctgccaacaggaagtcagaggctgaccctttgaagcgggtaccatttgaaaaacctcagtttagtctcagccagattaagaaggccattccacctcactgtttccagcgctctgttctccgctcattctcctatgttgtttatgacctcaccatagccttctgcctctattatgttgccacccattacttccacctccttcccggtcctctctctttcgtggcatggccaatctattgggctgtccagggttgcatccttactggtgtttgggtcattgcccatgagtgtggtcaccatgcattcagtgactaccagctgcttgatgatattgttggccttatcctccactccgctctcctagtcccgtacttttcatggaaatacagccatcgccgtcaccactccaacacaggttctcttgagcgagatgaagtatttgtgccaaagcagaagtccagtatcatgtggtactctaaataccttaacaatccaccaggcagagtcctcactcttgccgtcaccctcacgcttggttggcccttgtacttggcttttaatgtttctggaaggccttatgatagatttgcttgccactatgacccttatggtcccatttactctgaccgagaacgacttcaaatatatatatcagatgcaggagtacttgcagtatgctatggccttttctgtcttgccatggcaaaagggcttgcctgggtggtgtgtgtttatggagttccattgcttgtggtcaatggatttttggtgttgattacatttttgcagcacactcaccctgcattgccacactacacttcctctgagtgggactggttgagaggagctttagcaacagtggatagagattatggaatcctgaacaaggtcttccataatattacagacactcatgtagctcatcacttgttctccacaatgccacattatcatgcaatggaggcgacaaaggcaataaagcccatcttgggagagtattatcggtttgatgggactccatttgtcaaggcaatgtggagagaggcaagagagtgtatttatgtggagccagatcaaagtactcagagcaaaggtgtattttggtacaacaataagttgtga

SEQ ID NO: 123 - protein, 383 aa, Glycine max
MGAGGRTAVPPANRKSEADPLKRVPFEKPQFSLSQIKKAIPPHCFQRSVLRSFSYVVYDLTIAFCLYYVATHYFHLLPGPLSFVAWPIYWAVQGCILTGVWVIAHECGHHAFSDYQLLDDIVGLILHSALLVPYFSWKYSHRRHHSNTGSLERDEVFVPKQKSSIMWYSKYLNNPPGRVLTLAVTLTLGWPLYLAFNVSGRPYDRFACHYDPYGPIYSDRERLQIYISDAGVLAVCYGLFCLAMAKGLAWVVCVYGVPLLVVNGFLVLITFLQHTHPALPHYTSSEWDWLRGALATVDRDYGILNKVFHNITDTHVAHHLFSTMPHYHAMEATKAIKPILGEYYRFDGTPFVKAMWREARECIYVEPDQSTQSKGVFWYNNKL

SEQ ID NO: 124 - DNA, 1176 bp, Glycine max
atggctctgagactgaaccctatccccacccaaaccttctccctcccccaaatggccagtctcagatctcccaggttccgcatggcctccaccctccgctccggttccaaagaggttgaaaatattaagaagccattcactcctcccagagaagtgcatgttcaagtaacccactctatgcctcctcagaagattgagattttcaaatctttggaggattgggctgagcagaacatcttgactcatcttaaacctgttgaaaaatgttggcaaccacaagattttttaccggatccttcctctgatggatttgaagagcaagtgaaggaactgagagagagggcaaaggagcttccagatgattactttgttgttctggtcggagacatgatcacagaggaagccctgcctacttaccaaacaatgttaaatactttggatggagttcgtgatgaaacaggtgccagccttacttcctgggcaatttggacaagggcatggactgctgaagaaaacagacacggtgatcttcttaacaaatatctttacttgagtggtcgagttgacatgaaacaaattgaaaagacaattcagtaccttattgggtctggaatggatcctcgaaccgagaacagcccctaccttggtttcatttacacttcatttcaagagagggcaaccttcatatcccacggaaacacagccaggcttgctaaggagcacggcgatataaagttggcccagatctgcggcatgattgcctcagatgagaaacgccatgagactgcatacacgaagatagtggaaaagctatttgaggtcgatcctgacggtacagttatggcgtttgccgacatgatgaggaagaagattgccatgccagcacacctcatgtatgacggccgtgatgacaacctgtttgatagctactcttcggtcgcgcagcgcattggggtctacaccgccaaggactatgctgacatacttgagtttctggtggggaggtggaaggtggagcagctaactggactttcaggcgagggaagaaaggctcaagaatacatttgcgggctgccgccaagaatcagaaggttggaggagagagctcaagcaagagtcaaggagtcgtcaacacttaaattcagttggattcatgacagggaagtactactctaa

SEQ ID NO: 125 - protein, 391 aa, Glycine max
MALRLNPIPTQTFSLPQMASLRSPRFRMASTLRSGSKEVENIKKPFTPPREVHVQVTHSMPPQKIEIFKSLEDWAEQNILTHLKPVEKCWQPQDFLPDPSSDGFEEQVKELRERAKELPDDYFVVLVGDMITEEALPTYQTMLNTLDGVRDETGASLTSWAIWTRAWTAEENRHGDLLNKYLYLSGRVDMKQIEKTIQYLIGSGMDPRTENSPYLGFIYTSFQERATFISHGNTARLAKEHGDIKLAQICGMIASDEKRHETAYTKIVEKLFEVDPDGTVMAFADMMRKKIAMPAHLMYDGRDDNLFDSYSSVAQRIGVYTAKDYADILEFLVGRWKVEQLTGLSGEGRKAQEYICGLPPRIRRLEERAQARVKESSTLKFSWIHDREVLL

SEQ ID NO: 126 - DNA, 1209 bp, Glycine max
atgcttccattgcttcatctgactcactcatcaatggctctgagactgaaccctatccccacccaaaccttctccctcccccaaatgcccagcctcagatctccccgcttccgcatggcttccaccctccgctccggttccaaagaggttgaaaatattaagaagccattcactcctcccagagaagtgcatgttcaagtaacccactctatgcctccccagaagattgagattttcaaatctttggaggattgggctgaccagaacatcttgactcatcttaaacctgtagaaaaatgttggcaaccacaggattttttacccgacccctcctcagatggatttgaagagcaagtgaaggaactgagagagagagcaaaggagattccagatgattactttgttgttcttgtcggagacatgatcacagaggaagctctgcctacttaccaaactatgttaaatactttggatggagttcgtgatgaaacaggtgccagccttacttcctgggcaatttggacaagggcatggactgctgaagaaaacagacacggtgatcttcttaacaaatatctgtacttgagtggacgagttgacatgaaacaaattgagaagacaattcagtaccttattgggtctgggatggatcctcggaccgagaacagcccctaccttggtttcatttacacttcatttcaagagagggcaaccttcatatcccacggaaacacggccaggcttgcgaaggagcatggtgacataaaattggcacagatctgcggcatgattgcctcagatgagaagcgccacgagactgcatacacaaagatagtggaaaagctgtttgaggttgatcctgatggtacagttatggcatttgccgacatgatgaggaagaagattgctatgccagcacaccttatgtatgacggccgcgacgacaacctgtttgataactactctgccgtcgcgcagcgcattggggtctacactgcaaaggactatgctgacatactcgaatttctggtggggaggtggaaggtggagcagctaaccggactttcaggtgagggaagaaaggctcaggaatacgtttgtgggctgccaccaagaatcagaaggttggaggagagagctcaagcaagaggcaaggagtcgtcaacacttaaattcagttggattcatgacagggaagtactactctaa

SEQ ID NO: 127 - protein, 402 aa, Glycine max
MLPLLHLTHSSMALRLNPIPTQTFSLPQMPSLRSPRFRMASTLRSGSKEVENIKKPFTPPREVHVQVTHSMPPQKIEIFKSLEDWADQNILTHLKPVEKCWQPQDFLPDPSSDGFEEQVKELRERAKEIPDDYFVVLVGDMITEEALPTYQTMLNTLDGVRDETGASLTSWAIWTRAWTAEENRHGDLLNKYLYLSGRVDMKQIEKTIQYLIGSGMDPRTENSPYLGFIYTSFQERATFISHGNTARLAKEHGDIKLAQICGMIASDEKRHETAYTKIVEKLFEVDPDGTVMAFADMMRKKIAMPAHLMYDGRDDNLFDNYSAVAQRIGVYTAKDYADILEFLVGRWKVEQLTGLSGEGRKAQEYVCGLPPRIRRLEERAQARGKESSTLKFSWIHDREVLL

SEQ ID NO: 128 - DNA, 1131 bp, Glycine max
atggttaaagacacaaagcctttagcctatgctgctaataatggataccaaaaggaagcttttgatcccagtgctcctccaccgtttaagattgcagaaatcagagttgcaataccaaaacattgctgggtcaagaatccatggagatccctcagttatgttctcagggatgtgcttgtaattgctgcattgatggctgctgcaagtcacttcaacaactggcttctctggctaatctattggcccattcaaggaacaatgttctgggctctgtttgttcttggacatgattgtggccatggaagcttttcagacagcccttttctaaatagcctggtgggacacatcttgcattcctcaattcttgtgccataccatggatggagaattagccacagaactcaccatcaaaatcatggacacattgagaaggatgaatcctgggttccattaaccgagaagatttacaagaatctagacaacatgacaagacttgttagattcactgtgccatttccattgtttgtgtatccaatttatttgttctcaagaagccccggaaaggaaggttctcacttcaatccctacagcaatctgttcccacccagtgagagaaagggaatagcaatatcaacactgtgttgggttaccatgttttctatgcttatctatctctccttcataactagtccagttctattgctcaagctctatggaattccatattggatatttgttatgtggctggactttgtcacatacttgcatcaccatggtcatcatcagaaactgccttggtatcgcggcaaggaatggagttatttaagaggtggtctcacaactgtggatcgtgactatggttggatcaataacattcaccatgacattggcacccatgttattcaccatcttttccctcaaattcctcattatcacctcgttgaagcgacacaagcagcaaaatcagttcttggagagtattaccgtgagccagaaagatctgcaccattaccatttcatctaataaagtatttaattcagagtatgagacaagaccacttcgtaagtgacactggagatgtggtttattatcagactgattctctgcaccttcactcgcaccgagactga

SEQ ID NO: 129 - protein, 376 aa, Glycine max
MVKDTKPLAYAANNGYQKEAFDPSAPPPFKIAEIRVAIPKHCWVKNPWRSLSYVLRDVLVIAALMAAASHFNNWLLWLIYWPIQGTMFWALFVLGHDCGHGSFSDSPFLNSLVGHILHSSILVPYHGWRISHRTHHQNHGHIEKDESWVPLTEKIYKNLDNMTRLVRFTVPFPLFVYPIYLFSRSPGKEGSHFNPYSNLFPPSERKGIAISTLCWVTMFSMLIYLSFITSPVLLLKLYGIPYWIFVMWLDFVTYLHHHGHHQKLPWYRGKEWSYLRGGLTTVDRDYGWINNIHHDIGTHVIHHLFPQIPHYHLVEATQAAKSVLGEYYREPERSAPLPFHLIKYLIQSMRQDHFVSDTGDVVYYQTDSLHLHSHRD

SEQ ID NO: 130 - DNA, 1143 bp, Glycine max
atggttaaagacacaaagcctttagcctatgctgccaataatggataccaacaaaagggttcttcttttgattttgatcctagcgctcctccaccgtttaagattgcagaaatcagagcttcaataccaaaacattgctgggtcaagaatccatggagatccctcagttatgttctcagggatgtgcttgtaattgctgcattggtggctgcagcaattcacttcgacaactggcttctctggctaatctattgccccattcaaggcacaatgttctgggctctctttgttcttggacatgattgtggccatggaagcttttcagatagccctttgctgaatagcctggtgggacacatcttgcattcctcaattcttgtgccataccatggatggagaattagccacagaactcaccatcaaaaccatggacacattgagaaggatgagtcatgggttccattaacagagaagatttacaagaatctagacagcatgacaagactcattagattcactgtgccatttccattgtttgtgtatccaatttatttgttttcaagaagccccggaaaggaaggctctcacttcaatccctacagcaatctgtttccacccagtgagagaaaaggaatagcaatatcaacactgtgttgggctaccatgttttctctgcttatctatctctcattcataactagtccacttctagtgctcaagctctatggaattccatattggatatttgttatgtggctggactttgtcacatacttgcatcaccatggtcaccaccagaaactgccttggtaccgcggcaaggaatggagttatttaagaggtggcctcaccactgtggatcgtgactatggttggatcaataacattcaccatgacattggcacccatgttatccaccatcttttcccccaaattcctcattatcacctcgttgaagcgacacaagcagcaaaaccagttcttggagattactaccgtgagccagaaagatctgcgccattaccatttcatctaataaagtatttaattcagagtatgagacaagaccacttcgtaagtgacactggagatgttgtttattatcagactgattctctgctcctccactcgcaacgagactga

SEQ ID NO: 131 - protein, 380 aa, Glycine max
MVKDTKPLAYAANNGYQQKGSSFDFDPSAPPPFKIAEIRASIPKHCWVKNPWRSLSYVLRDVLVIAALVAAAIHFDNWLLWLIYCPIQGTMFWALFVLGHDCGHGSFSDSPLLNSLVGHILHSSILVPYHGWRISHRTHHQNHGHIEKDESWVPLTEKIYKNLDSMTRLIRFTVPFPLFVYPIYLFSRSPGKEGSHFNPYSNLFPPSERKGIAISTLCWATMFSLLIYLSFITSPLLVLKLYGIPYWIFVMWLDFVTYLHHHGHHQKLPWYRGKEWSYLRGGLTTVDRDYGWINNIHHDIGTHVIHHLFPQIPHYHLVEATQAAKPVLGDYYREPERSAPLPFHLIKYLIQSMRQDHFVSDTGDVVYYQTDSLLLHSQRD

SEQ ID NO: 132 - DNA, 1143 bp, Glycine max
atggttcaagcacagcctctacaacatgttggtaatggtgcagggaaagaagatcaagcttattttgatccaagtgctccaccacccttcaagattgcaaatatcagagcagcaattccaaaacattgctgggagaagaacacattgagatctctgagttatgttctgagggatgtgttggtagtgactgcattggtagctgcagcaatcggcttcaatagctggttcttctggccactctattggcctgcacaaggcacaatgttttgggcactttttgttcttggacatgattgtggtcatggaagtttttcaaacagtcctttgttgaacagcattgtgggccacatcttgcactcttcaattcttgtaccataccatggatggagaattagccacaggactcaccatcagaaccatggccatgttgagaaggatgaatcatgggttccgcttacagagaaagtttacaagaatctagacaacatgacaagaatgatgagattcactcttcctttccccatctttgcataccccttttatttgtggagcagaagccctggaaaagaaggctctcatttcaacccttacagcaacttgttctctcctggtgagagaagagatgtgctaacttcaactctgtgttggggcatcatgctttctgtgcttctctatctttccctcacaatgggtccactttttatgctcaagctctatggggttccctatttgatcttcgtcatgtggctggatttcgtcacgtacttgcatcatcatggttacaagcagaaactgccttggtaccgtggccaggaatggagttatctaaggggtggtcttacaacagtagatcgcgactatggttggatcaacaacattcaccatgacattggcacccatgttatccatcaccttttccctcaaattccacattatcatttaatcgaagcgactaaagcagcaaaggcagtgctaggaaagtattatcgtgagcctcagaaatctgggccattgccacttcatctaataaagtacttgctccacagcataagtcaggatcacttcgttagcgactctggcgacattgtgtactaccagactgattcccagctccacaaagattcttggacccagtccaactaa

SEQ ID NO: 133 - protein, 380 aa, Glycine max
MVQAQPLQHVGNGAGKEDQAYFDPSAPPPFKIANIRAAIPKHCWEKNTLRSLSYVLRDVLVVTALVAAAIGFNSWFFWPLYWPAQGTMFWALFVLGHDCGHGSFSNSPLLNSIVGHILHSSILVPYHGWRISHRTHHQNHGHVEKDESWVPLTEKVYKNLDNMTRMMRFTLPFPIFAYPFYLWSRSPGKEGSHFNPYSNLFSPGERRDVLTSTLCWGIMLSVLLYLSLTMGPLFMLKLYGVPYLIFVMWLDFVTYLHHHGYKQKLPWYRGQEWSYLRGGLTTVDRDYGWINNIHHDIGTHVIHHLFPQIPHYHLIEATKAAKAVLGKYYREPQKSGPLPLHLIKYLLHSISQDHFVSDSGDIVYYQTDSQLHKDSWTQSN

SEQ ID NO: 134 - DNA, 1251 bp, Glycine max
atggtggcaacagctgctacttcatcatttttccctgttacttcaccctcgccggactctggtggagcaggcagcaaacttggtggtgggcctgcaaaccttggaggactaaaatccaaatctgcgtcttctggtggcttgaaggcaaaggcgcaagccccttcgaaaattaatggaaccacagttgttacatctaaagaaagcttcaagcatgatgatgatctaccttcgcctccccccagaacttttatcaaccagttgcctgattggagcatgcttcttgctgctatcacaacaattttcttggccgctgaaaagcagtggatgatgcttgattggaagccacggcgacctgacatgcttattgacccctttgggataggaaaaattgttcaggatggtcttgtgttccgtgaaaacttttctattagatcatatgagattggtgctgatcgtaccgcatctatagaaacagtaatgaaccatttgcaagaaactgcacttaatcatgttaaaagtgctgggcttcttggtgatggctttggttccacgccagaaatgtgcaaaaagaacttgatatgggtggttactcggatgcaggttgtggtggaacgctatcctacatggggtgacatagttcaagtggacacttgggtttctggatcagggaagaatggtatgcgccgtgattggcttttacgtgactgcaaaactggtgaaatcttgacaagagcttccagtgtttgggtcatgatgaataagctaacacggaggctgtctaaaattccagaagaagtcagacaggagataggatcttattttgtggattctgatccaattctggaagaggataacagaaaactgactaaacttgacgacaacacagcggattatattcgtaccggtttaagtcctaggtggagtgatctagatatcaatcagcatgtcaacaatgtgaagtacattggctggattctggagagtgctccacagccaatcttggagagtcatgagctttcttccatgactttagagtataggagagagtgtggtagggacagtgtgctggattccctgactgctgtatctggggccgacatgggcaatctagctcacagcgggcatgttgagtgcaagcatttgcttcgactggaaaatggtgctgagattgtgaggggcaggactgagtggaggcccaaacctgtgaacaactttggtgttgtgaaccaggttccagcagaaagcacctaa

SEQ ID NO: 135 - protein, 416 aa, Glycine max
MVATAATSSFFPVTSPSPDSGGAGSKLGGGPANLGGLKSKSASSGGLKAKAQAPSKINGTTVVTSKESFKHDDDLPSPPPRTFINQLPDWSMLLAAITTIFLAAEKQWMMLDWKPRRPDMLIDPFGIGKIVQDGLVFRENFSIRSYEIGADRTASIETVMNHLQETALNHVKSAGLLGDGFGSTPEMCKKNLIWVVTRMQVVVERYPTWGDIVQVDTWVSGSGKNGMRRDWLLRDCKTGEILTRASSVWVMMNKLTRRLSKIPEEVRQEIGSYFVDSDPILEEDNRKLTKLDDNTADYIRTGLSPRWSDLDINQHVNNVKYIGWILESAPQPILESHELSSMTLEYRRECGRDSVLDSLTAVSGADMGNLAHSGHVECKHLLRLENGAEIVRGRTEWRPKPVNNFGVVNQVPAEST

SEQ ID NO: 136 - DNA, 1251 bp, Glycine max
atggtggcaacagctgcaacttcatcatttttccctgttacttcaccctcgccggactctggtggagcaggcagcaaacttggtggtgggcctgcgaaccttggaggtctaaaatccaaatctgtgtcttctggtggcttgaaggcaaaggcacaagcccctttgaaaattaatggaaccacagttgttacatctaaagaaatcttgaagcatgaggatgatctaccttcacctccccccaggacttttatcaaccagttacctgattggagcatgcttcttgctgccattacaacaattttcttggcagctgaaaagcagtggatgatgcttgattggaagccaaggcgacctgacatgcttattgacccctttgggataggaaaaattgttcaggatggtctcgtgttccgtgaaaacttttctattagatcatatgagattggtgctgatcgaaccgcatctatagaaacagtaatgaaccatttgcaagaaactgcacttaatcatgttaaaagtgctgggcttcttggtgatggcttcggttccacgccagaaatgtgcaaaaagaacttgatatgggtagttactcggatgcaggttgtggtggatcgctatcctacatggggtgacgtagttcaagtagacacctgggcttctggatcagggaagaatgctatgcgccgtgattgggttttacgtgactgcaaaactggtgaaatcttgacaagagcttccagtgtttgggtcatgatgaataagctgacacggaggctgtctaaaattccagaagaagtcagacaggagataggatcttattttgtggattctgatccaattctagaagaggataacagaaaactgactaaacttgacgacaacacagcagattatattcgtaccggtttaagttctaggtggagtgatctagatatcaatcagcatgtcaacaatgtgaagtacattgactggattctggagagtgctccacagccaatcttggagagtcatgagctttcttccgtgactttagagtataggagggagtgtggtagggacagtgtgctggattccctgactgctgtatctggggccgacatgggcaatctagctcacagtggacatgttgagtgcaagcatttgcttcgactcgaaaatggtgctgagattgtgaggggcaggactgagtggaggcccaaacctatgaacaacattggtgttgtgaaccaggttccagcagaaagcacctaa

SEQ ID NO: 137 - protein, 416 aa, Glycine max
MVATAATSSFFPVTSPSPDSGGAGSKLGGGPANLGGLKSKSVSSGGLKAKAQAPLKINGTTVVTSKEILKHEDDLPSPPPRTFINQLPDWSMLLAAITTIFLAAEKQWMMLDWKPRRPDMLIDPFGIGKIVQDGLVFRENFSIRSYEIGADRTASIETVMNHLQETALNHVKSAGLLGDGFGSTPEMCKKNLIWVVTRMQVVVDRYPTWGDVVQVDTWASGSGKNAMRRDWVLRDCKTGEILTRASSVWVMMNKLTRRLSKIPEEVRQEIGSYFVDSDPILEEDNRKLTKLDDNTADYIRTGLSSRWSDLDINQHVNNVKYIDWILESAPQPILESHELSSVTLEYRRECGRDSVLDSLTAVSGADMGNLAHSGHVECKHLLRLENGAEIVRGRTEWRPKPMNNIGVVNQVPAEST

SEQ ID NO: 138 - DNA, 1151 bp, Glycine max
  CDS (71)..(1090)
ctaagctctcttttagtcttactcacaaacacttttttcactgcttccattacgaacatatatttattatatggctcctgaacttgtccccaccgttgtgaaatccagtgctgcgttcacgaaacccgcgacccttccaaggcgtgcctacgtgacattcctcgccggaaacggtgactacgtgaaaggggtggttggcctcgccaaagggttgcgaaaggtgaaaaccgcgtacccgttggtggtggctgtcctccccgatgtgccggaggagcaccgtaagatcctggagtctcagggctgcatcgttcgcgagatcgaacccgtttacccacccgaaaaccaaacccagtttgccatggcttattacgtcatcaactactccaagctccgtatatgggagtttgtggagtacagcaagatgatatacttggacggagacattgaggtatatgagaacatagaccacctatttgacctacctgatggtaacttttacgctgtgatggattgtttctgcgagaagacatggagtcacacccctcagtacaaggtgggttactgccagcaatgcccggagaaggtgcggtggcccaccgaattgggtcagcccccttctctttacttcaacgctggcatgttcgtgttcgaacccaacatcgccacctatcatgacctattgaaaacggtgcaagtcaccactcccacctcgttcgctgaacaagatttcttgaacatgtacttcaaggacatttacaagccaatccctttaaattacaatcttgtcctcgccatgctgtggcgccacccggaaaacgttaaattagaccaagtcaaggttgttcactattgcgcagcggggtccaagccatggagatatacggggaaggaagagaatatgcagagggaggacataaagatgctggtgaagaaatggtgggatatctacaatgatgcttcgcttgactacaagccattgatgaatgcaagtgaagctccagcagcggatggtgttgacattgaacaattcgtgcaggctctatcagaggttggtcatgttcaatatgtcaccgcgccttcagcagcttaattaagagggcacattcaaatcacgacaaaaaacaaccaagtgaaaaaaaaaaaaaaaaaaa

SEQ ID NO: 139 - protein, 339 aa, Glycine max
MAPELVPTVVKSSAAFTKPATLPRRAYVTFLAGNGDYVKGVVGLAKGLRKVKTAYPLVVAVLPDVPEEHRKILESQGCIVREIEPVYPPENQTQFAMAYYVINYSKLRIWEFVEYSKMIYLDGDIEVYENIDHLFDLPDGNFYAVMDCFCEKTWSHTPQYKVGYCQQCPEKVRWPTELGQPPSLYFNAGMFVFEPNIATYHDLLKTVQVTTPTSFAEQDFLNMYFKDIYKPIPLNYNLVLAMLWRHPENVKLDQVKVVHYCAAGSKPWRYTGKEENMQREDIKMLVKKWWDIYNDASLDYKPLMNASEAPAADGVDIEQFVQALSEVGHVQYVTAPSAA

SEQ ID NO: 140 - DNA, 987 bp, Glycine max
atggctcctaatatcaccactgtcaaaaccaccatcaccgacgctcaagccaaggtcgccaccgatcatggtcgtgcctacgtcaccttcctcgccggaaacggtgactatgtgaaaggtgtcgttggcttggcaaaaggtctgagaaaagtgaagagcatgtaccctctggtggttgcagtgctacccgatgttccccaagatcaccgcaacattctcacctcccaaggttgcattgttagagagattgagcccgtgtaccccccagagaatcaaacccagtttgccatggcatattacgtcatcaactattccaagctacgtatttgggagtttgtggagtacagcaagatgatatacctagacggtgatatccaagtttttgacaacattgaccacttgtttgacttgcctgataactacttctatgcggtgatggactgtttctgtgagccaacttggggccacactaaacaatatcagatcggttactgccagcagtgcccccataaggttcagtggcccactcactttgggcccaaacctcctctctatttcaatgctggcatgtttgtgtatgagcccaatttggctacttaccgtgacctccttcaaacagtccaagtcacccagcccacttcctttgctgaacaggattttttgaacatgtacttcaaggacaaatataggccaattcctaatgtctacaatcttgtgctggccatgctgtggcgtcaccctgagaacgttgagcttgacaaagttaaagtggttcactactgtgctgctgggtctaagccttggaggtacactgggaaggaggagaatatggagagagaagatatcaagatgttagtgaaaaagtggtgggatatatatgaggatgagactttggactacaacaatccactcaatgtggataagttcactgcggcacttatggaggttggtgaagtcaagttcgtccgtgccccatctgctgcttaa

SEQ ID NO: 141 - protein, 328 aa, Glycine max
MAPNITTVKTTITDAQAKVATDHGRAYVTFLAGNGDYVKGVVGLAKGLRKVKSMYPLVVAVLPDVPQDHRNILTSQGCIVREIEPVYPPENQTQFAMAYYVINYSKLRIWEFVEYSKMIYLDGDIQVFDNIDHLFDLPDNYFYAVMDCFCEPTWGHTKQYQIGYCQQCPHKVQWPTHFGPKPPLYFNAGMFVYEPNLATYRDLLQTVQVTQPTSFAEQDFLNMYFKDKYRPIPNVYNLVLAMLWRHPENVELDKVKVVHYCAAGSKPWRYTGKEENMEREDIKMLVKKWWDIYEDETLDYNNPLNVDKFTAALMEVGEVKFVRAPSAA

SEQ ID NO: 142 - DNA, 1350 bp, Glycine max
gcacgagaaacaaccaacctcttcagtgatctttgattagtactaagctaaaccatttcttattccctcaaaatcaaaacctttttctttctagctatttcccttttcaaatcatgccacctaacatcaccaccgttgttgccaatgtcaccaccgagcaattacccaaggctcgtggaggaagtgggcgtgccttcgtgacctttcttgctgggaacggtgattacgtaaagggtgtcgtgggtttggccaaaggactgagaaaggccaaaagcatgtaccctttggtggttgctgtgttaccagatgttcctgaagaacatcgtgagattctcaaatcccaaggttgcattgtcagggagattgaacctgtgtaccctcctgagaaccagacccagttcgccatggcctattatgtcatcaattactccaagctacgtatttgggagttcgtggagtacaagaagacgatatacctagacggtgacatccaagtatttggaaacatagaccacttgtttgatctgcctgataattatttctatgcggtgatggattgtttctgcgagaagacttggagccacacccctcagttccagattgggtactgccaacagtgccctgataaggttcaatggccctctcactttggttccaaacctcctctatatttcaatgctggcatgtttgtttatgagcctaatctcgacacctaccgtgatcttctccaaactgtccaactcaccaagcccacttcttttgctgagcaggactttctcaacatgtacttcaaggacaagtacaagccaataccgaacatgtacaaccttgtgctggccatgttgtggcgtcaccctgaaaatgttgaacttgataaagttcaagtggttcattactgtgctgctgggtctaagccttggaggttcactgggaaggaagagaacatggatagggaagatatcaagatgcttgtgaagaagtggtgggacatatatgaagatgagacactggactacaataacaactctgtcaacgtggaacgtttcacatcggcactattggatgctgggggctttcagtttgtgccagcaccttctgctgcctaatatgcttattatttacagctacaaattaatgttaattaacgacaaagtatatgtattgttatttgctttttttcgtttttgggtcttatatatgaaggaacaacgtctatggttttaatttggatgaccttcttgtatacaaagccacatgtgatctcatacagcttttgattattattaagaaattagaggaccttttattatgagtcctttacttaaaaaaaaaaaaaaaaaaaaaaaaaaa

SEQ ID NO: 143 - protein, 358 aa, Glycine max
SLISTKLNHFLFPQNQNLFLSSYFPFQIMPPNITTVVANVTTEQLPKARGGSGRAFVTFLAGNGDYVKGVVGLAKGLRKAKSMYPLVVAVLPDVPEEHREILKSQGCIVREIEPVYPPENQTQFAMAYYVINYSKLRIWEFVEYKKTIYLDGDIQVFGNIDHLFDLPDNYFYAVMDCFCEKTWSHTPQFQIGYCQQCPDKVQWPSHFGSKPPLYFNAGMFVYEPNLDTYRDLLQTVQLTKPTSFAEQDFLNMYFKDKYKPIPNMYNLVLAMLWRHPENVELDKVQVVHYCAAGSKPWRFTGKEENMDREDIKMLVKKWWDIYEDETLDYNNNSVNVERFTSALLDAGGFQFVPAPSAA

1. A transgenic soybean seed comprising a recombinant DNA construct, the recombinant DNA construct comprising at least one polynucleotide encoding a polypeptide selected from the group consisting of (i) a DGAT polypeptide, (ii) an ODP1 polypeptide, (iii) a Lec1 polypeptide, and (iv) a combination thereof, the polynucleotide being linked to at least one regulatory sequence, and wherein the transgenic soybean seed comprises one or more of (i) a first construct down regulating GAS activity, and (ii) a second construct down regulating a fad 3 activity, a fad2 activity, or a fat2B activity, wherein the first construct and the second construct are on the same construct or are on different constructs as the recombinant DNA construct, and wherein the transgenic soybean seed has an at least 10% percent increase in total fatty acid and an at least 1% percent increase in protein, when compared to a control null segregant seed.

2. The transgenic soybean seed of claim 1, wherein the seed exhibits a percent decrease of at least one fatty acid selected from the group consisting of palmitic acid, linoleic acid and linolenic acid, when compared to a control null segregant seed.

3. The transgenic soybean seed of claim 1, wherein the seed exhibits an at least 25% increase of oleic acid when compared to a control null segregant seed.

4. The transgenic seed of claim 1, wherein the seed further exhibits an at least 60% decrease of raffinose saccharides when compared null segregant seed.

5. The transgenic seed of claim 1, wherein the seed exhibits a percent decrease in saturated fatty acids when compared to a null segregant seed.

6. The transgenic soybean seed of claim 1 wherein the at least one regulatory sequence is a soybean sucrose synthase promoter or a Medicago truncatula sucrose synthase promoter.

7. The transgenic soybean seed of claim 1, wherein the DGAT sequence is a DGAT1 sequence.

8. The transgenic soybean seed of claim 1, wherein the DGAT sequence is a DGAT2 sequence.

9. Meal prepared from the transgenic soybean seed of claim 1.

10-11. (canceled)

12. A method for increasing the total fatty acids and protein in a transgenic seed, the method comprising transforming at least one regenerable soybean cell with at least one recombinant construct comprising at least one polynucleotide encoding a polypeptide selected from the group consisting of (i) a DGAT polypeptide, (ii) an ODP1 polypeptide, (iii) a Lec1 polypeptide, and (iv) a combination thereof, the polynucleotide being linked to at least one regulatory sequence, wherein transgenic seed from the plant regenerated from the soybean cell comprises the recombinant DNA construct and one or more of a first construct down regulating GAS activity and a second construct down regulating a fad 3 activity, a fad2 activity, or a fat2B activity, wherein the first construct and the second construct are on the same construct or are on different constructs as the recombinant DNA construct, and wherein expression of the recombinant construct and the one or more constructs in the transgenic seed results in an at least 10% increase of total fatty acids and an at least 1% increase of protein, when compared to a control null segregant seed.

13. The method of claim 12, wherein the percent increase in protein is at least 4% when compared to the control null segregant seed.

14. The method of claim 12, wherein the transgenic seed further exhibits a percent decrease of at least 60% in total raffinose saccharides when compared to the null segregant seed.

15. The method of claim 12, wherein the transgenic seed further exhibits a percent decrease of total saturated fatty acids when compared to the null segregant seed.

16. The method of claim 12, wherein the transgenic seed further exhibits an at least 50% decrease of linolenic acid.

17. The method of claim 12, wherein the transgenic seed further exhibits an at least 20% increase of oleic acid.

18. The method of claim 12, wherein the DGAT sequence is DGAT1.

19. The method of claim 12, wherein the DGAT sequence is a Yarrowia or a soybean sequence.

20. The method of claim 12, wherein the at least one regulatory sequence is a soybean sucrose synthase promoter or Medicago truncatula sucrose synthase promoter.

21-24. (canceled)

25. A method of increasing the percentage of total fatty acid and protein of a soybean seed, the method comprising the steps of:
(a) crossing (I) a first transgenic soybean plant comprising a recombinant construct comprising at least one polynucleotide encoding a polypeptide selected from the group consisting of (i) a DGAT polypeptide, (ii) an ODP1 polypeptide, (iii) a Lec1 polypeptide, and (iv) a combination thereof, the polynucleotide being linked to at least one regulatory sequence, with (II) a second transgenic soybean plant comprising a second construct down regulating a fad2 activity; and
(b) selecting a third transgenic plant from the cross of step (a), wherein seed of the third transgenic plant comprises the polynucleotide and the second construct and wherein expression of the polypeptide and the second construct results in a percent increase in protein in the transgenic soybean seed, when compared to the percent increase of a control null segregant seed.

26. The third transgenic plant obtained from the method of claim 25.

27-29. (canceled)
